(19) United States
(12) Patent Application Publication
(10) Pub. No.: US 2025/0283055 A1
(43) Pub. Date: Sep. 11, 2025

(54) BROAD SPECTRUM VIRUS-TRAPPING NANOSHELLS

(71) Applicant: TECHNISCHE UNIVERSITÄT MÜNCHEN, München (DE)

(72) Inventors: Alba MONFERRER, München (DE); Jessica KRETZMANN, Unterföhring (DE); Hendrik DIETZ, Haar (DE)

(21) Appl. No.: 18/859,607

(22) PCT Filed: Apr. 28, 2023
(86) PCT No.: PCT/EP2023/061264

§ 371 Date: Oct. 24, 2024

(30) Foreign Application Priority Data
Apr. 28, 2022 (EP) 22170578.3

(51) Int. Cl. C12N 7/04; C12N 15/11

(52) U.S. Cl. CPC C12N 7/04; C12N 15/11

(57) ABSTRACT

The present invention relates to a DNA-based nanostructure for encapsulating viruses or viral particles, to a composition comprising one or more viruses or viral particles encapsulated by such a DNA-based nanostructure according to the present invention, and to a method for encapsulating one or more viruses or viral particles by using such a DNA-based nanostructure.

### RELATED APPLICATIONS

[0001] This application is the U.S. national phase of International Patent Application No. PCT/EP2023/061264, filed Apr. 28, 2023, which claims priority to European Patent Application No. 22170578.3, filed Apr. 28, 2022, which are hereby incorporated by reference in their entirety.

### INCORPORATION BY REFERENCE OF SEQUENCE LISTING

[0002] This application includes, as a separate part of disclosure, a Sequence Listing in computer-readable form (Filename: SubSequenceListing.xml, 2,370,592 bytes; created Mar. 20, 2025). The contents of the Sequence Listing xml file are incorporated herein by reference in its entirety.

### FIELD OF THE INVENTION

[0003] The present invention relates to a DNA-based nanostructure for encapsulating a broad spectrum of viruses or viral particles, to a composition comprising one or more viruses or viral particles encapsulated by such a DNA-based nanostructure according to the present invention, and to a method for encapsulating one or more viruses or viral particles by using such a DNA-based nanostructure.

### BACKGROUND OF THE INVENTION

[0004] At present, there are over 200 known viral-vector borne human diseases, of which only nine are treatable with current antiviral drugs (Heida et al., Drug Discov. Today 26 (2021) 122-137). In the search for effective antiviral therapies, neutralizing antibodies are increasingly being considered for treating acute viral infections (see, for example, Wang et al., Science. 2021 Aug. 13; 373 (6556): eabh1766. doi: 10.1126/science.abh1766. Epub 2021 Jul. 1. PMID: 34210892; Taylor, P. C. et al., Nat. Rev. Immunol. 21 (2021) 382-393). Antiviral antibodies often derive their virus-neutralizing function by blocking the interactions that viruses undergo with specific receptors on the surface of host cells that are required for receptor-mediated cell invasion. However, antibodies are prone to losing their function due to mutational drift, take time to develop, and will only be effective for one virus or virus serotype at a time. Furthermore, antibodies or other proteinaceous virus binders may cause adverse immunogenic effects in organisms and create substantial additional fabrication hurdles and costs.

[0005] Recently, a new concept for neutralizing viruses by encapsulation in macromolecular shells fabricated with DNA origami has been presented (WO 2021/165528). The shells mechanically prevent interactions between trapped viruses and host cells. For the proof-of-concept experiments, the inside of the shell was coated with antibodies to sequester virus particles in the shells. Heparin is mentioned as a potential alternative binding moiety, but no data are shown. One key advantage of the shells is that the virus-binding moieties used in their interior themselves do not need to have a neutralizing function, since this task is performed by the shell material. Nonetheless, as stated above, the use of antibodies in the virus trapping shells presents several challenges that may limit the usefulness of the virus-trapping concept. WO 2021/165528 used up to 90 antibodies per virus-trapping shells, which were attached via interaction with single-stranded oligonucleotide handles with 16-mer or 26-mer overhangs for hybridization. WO 2021/165528 demonstrates that virus particles can successfully be encapsulated in shells equipped with antibodies, but does not quantify the rate of encapsulations being achieved.

[0006] The concept laid out in WO 2021/165528 was described in a scientific publication as well (Sigl et al., Nat. Mater. 20 (2021) 1281-1289). Sigl et al. show the successful encapsulation of virus particles using antibody-equipped virus particles. Heparin is not mentioned as an alternative binding moiety, and no quantification of the rate of encapsulations is provided.

[0007] Knappe et al. (ACS Nano 2021; 14316-14322) describe DNA origami particles that are functionalized via click chemistry, so that different types of functional moieties, including antibodies and carbohydrates, can be coupled to the DNA origami particles. Heparin is not specifically mentioned in Knappe et al., and functionalization is performed at the outside of the DNA origami particles, since the DNA origami particles are closed shells. Thus, no information can be derived from Knappe et al. about the options for encapsulating virus particles in the interior of DNA origami shells and about any particularities of the optimal design of the attachment sites.

[0008] Another attractive avenue is the packaging of viral payload for the purposes of delivering viruses or other vectors for genetic information or other cargo to target cells or target tissue, as discussed e.g., in Antigen-Triggered Logic-Gating of DNA Nanodevices, Engelen et al., J. Am. Chem. Soc. 2021, 143, 51, 21630-21636, Dec. 20, 2021. Also here the use of antibodies as moieties to attach viruses or virus-like particles or other assemblies within DNA-based shells may limit the scope of such applications, due to the challenges listed above arising from the use of antibodies.

[0009] Thus, while different strategies for the treatment of viral infections have been developed or suggested up to date, there is still a need for the development of a concept of a generic antiviral drug platform for targeting a variety of viral pathogens. In particular, a concept would be highly desirous that does not rely on prior detailed knowledge about genetics and properties of the target virus. Additionally, there is an unmet need for the development of a system that permits the encapsulation of virus particles with high efficiency.

### SUMMARY OF THE INVENTION

[0010] It is an object of the present invention to provide constructs that enable the encapsulation of one or more viruses or viral particles. The solution to that problem, i. e. the use of macromolecular building blocks, such as DNA-based nanostructures, has not yet been taught or suggested by the prior art.

[0011] Therefore, in one aspect, the present invention relates to a DNA-based nanostructure, wherein said DNA-based nanostructure is a shell comprising a cavity enclosed by said DNA-based nanostructure, wherein said DNA-based nanostructure is formed by self-assembling DNA-based building blocks, wherein each of said self-assembling DNA-based building blocks is formed by a single-stranded DNA template strand and a set of oligonucleotides complementary to said single-stranded DNA template, wherein each of said oligonucleotides is either complementary to one contiguous DNA sequence stretch or to at least two non-contiguous DNA sequence stretches on said single-stranded DNA template, wherein each of said self-assembling DNA-based building blocks is a triangular and/or a rectangular prismoid, particularly a triangular prismoid, and wherein a subset of one or more of said oligonucleotides in one or more of said self-assembling DNA-based building blocks is/are each linked to a construct comprising at least one sulfonated or sulfated polysaccharide group pointing to the interior of said cavity, particularly a construct comprising one or two sulfonated or sulfated polysaccharide groups, wherein each said construct comprises (i) a handle comprising at least one binding site for said sulfonated or sulfated polysaccharide group, and (ii) said sulfonated or sulfated polysaccharide group(s) bound to said handle; wherein said handle has a length corresponding to at least the length of a single-stranded oligonucleotide comprising 30 nucleotides.

[0012] In a second aspect, the present invention relates to a composition comprising a DNA-based nanostructure according to the present invention encapsulating one or more viruses or viral particles.

[0013] In a third aspect, the present invention relates to a method for encapsulating one or more viruses or viral particles, comprising the steps of: providing a DNA-based nanostructure according to the present invention, and contacting said DNA-based nanostructure with a medium comprising, or suspected to comprise, said viruses or viral particles.

[0014] The disclosure contemplates all combinations of any one or more of the foregoing aspects and/or embodiments, as well as combinations with any one or more of the embodiments set forth in the detailed description and examples.

[0015] Other features, objects, and advantages of the compositions and methods herein will be apparent from the description and drawings, and from the claims.

### BRIEF DESCRIPTION OF THE DRAWINGS

[0016] FIG. 1 shows the DNA origami shells and functionalization with HS derivatives. A: A heparan sulfate proteoglycan (HSPG) interacts with a virus pathogen and mediates its cellular uptake (left). DNA origami shell schematics, with HS modifications in its interior, capable of binding and sequestering a viral particle (right). B: SPAAC reaction in between azide-modified HS oligomers and a DBCO-modified DNA oligo. The DNA sequence is complementary to the handles of the DNA origami shells in (e,f). C: PAGE characterization of the HS-modified DNA oligos. Products containing HS with sulfate and sulfonate groups (3a and 3c) migrate at a faster rate through the gel than the analog negative controls (3b and 3d) due to their increased anionic character. D: Cylindrical models of O and T1 shells made of 4 and 10 triangle subunits respectively, containing single stranded protruding oligos (termed handles, shown in red) decorating their interior. Each triangle subunit contains 9 handle positions. E: New T3 shell design consisting of 30 triangle subunits and featuring an inner cavity of 150 nm. Each triangle subunit also contains 9 handle positions. F: Negative stain TEM micrograph of T3 shells. Scale bar is 100 nm. G: Schematic representation of three different handle designs. H1 contains one HS modification per handle placed as close to the origami surface as possible. H2 also contains one HS modification per handle but has a polyT extension of 20 bases, allowing the handle to reach further than H1. H3 mimics a branched polymer containing two HS modifications per handle unit, therefore doubling the local HS density.

[0017] FIG. 2 shows viruses and VLPs trapped within HS-modified O, T1 and T3 shells. Negative stain TEM captions of a: AAV2, polio 3, mature dengue 1 and norovirus Gll.4 successfully trapped in O shells; b: HPV 16, SARS-CoV-2, chikungunya and rubella engulfed by T1 shells; c: adenovirus 5 captured with T3 shells. Scale bars are 100 nm.

[0018] FIG. 3 shows multiple viruses and VLPs trapped in HS-modified O, T1 and T3 shells Negative stain TEM images of a: up to four AAV2 in one O shell, b: up to three HPV 16 in one T1 shell, c: one HPV 16 coordinated by two O shells for complete occlusion of the virus particle; d: up to six AAV2 per T1 shell; e: up to three chikungunya VLPs per T3 shell; f: cooperative effect of multiple O shells capturing numerous AAV2 particles. Scale bar is 100 nm.

[0019] FIG. 4 shows cryo-EM analysis of virus-like particles trapped in DNA origami shells. a: Cryo-EM micrograph of O shells binding to HPV 16 VLPs; b: 2D class average images of one or two O shells binding to one HPV 16 particle, demonstrating different orientations of the complexes. The white arrows indicate the gap difference in between the two O shells, confirming the capture of differently sized VLP particles; c: 3D reconstructions of HPV 16 bound to one and two O shells; d: Cryo-EM micrograph of T1 shells binding to chikungunya VLPs; e: 2D class average images of T1 shells binding to chikungunya particles showing different orientations of the complex; f: Two different views of the 3D reconstruction of a T1 shell engulfing a chikungunya virus particle.

[0020] FIG. 5 shows the SPAAC reaction for 8-mer HS derivatives (1a and 1b). a: Click chemistry reaction in between azide-modified HS polymers and a DBCO-modified DNA oligo. The DNA sequence is complementary to the handles of the DNA origami shells. b: PAGE characterization of all the HS-modified DNA oligos.

[0021] FIG. 6 shows T3 shell design. a: Top and front view of a T3 cylindrical model. b: Cylindrical models of the triangles t1-t6 involved in the T3 shell assembly. Arrows indicate complementary side interactions.

[0022] FIG. 7 shows TEM field of view of T3 shells. The T3 DNA origami shells presented an inner diameter of ˜150 nm. Due to their flexibility, they appear deformed on the grid. Scale bar is 400 nm.

[0023] FIG. 8 shows TEM quantification of O shells for AAV2 trapping with the different handle designs. a: Schematic representation of the three different handle designs H1, H2 and H3. HS represented as red hexagons. H1 contains one HS modification per handle, placed closely to the origami surface. H2 also contains one HS modification per handle but has a polyT extension of 20 bases, allowing the handle to reach further than H1. H3 mimics a branched polymer containing two HS modifications per handle unit, therefore doubling the local HS density. b: Blind TEM quantification of full vs. empty O shells of each handle design when functionalized with 3c HS derivative and AAV2 excess. H1 presented ˜20% of full shells, H2˜84%, and H3˜96%. c: Schematic representation of an O half-shell and its ssDNA handles in the inner cavity.

[0024] FIG. 9 shows TEM of negative control for AAV2 trapping in O shells. Two fields of view of the same sample showing that no binding was observed when the 3d negative control HS modification was hybridized to H3 handle design. Scale bar is 100 nm.

[0025] FIG. 10 shows TEM of AAV2 trapping with O shell excess. Two fields of view of the same sample showing that all AAV2 particles were encapsulated when the origami shell was used in excess. Scale bar is 100 nm.

[0026] FIG. 11 shows TEM of free viruses and VLPs. TEM data showed that AAV2, poliovirus, HPV 16, chikungunya and adenovirus 5 are the purest samples of our library. Dengue, norovirus, SARS-CoV-2 and rubella visibly contained a high amount of protein debris and presented a variable range of particle sizes. Scale bar is 100 nm.

[0027] FIG. 12 shows TEM tomography of adenovirus 5 in a T3 shell. The slices of the tomogram calculated from an EM tilt series proved the full encapsulation of an adenovirus in the selected shell particle. Scale bar is 100 nm.

[0028] FIG. 13 shows TEM tomography of chikungunya VLPs in a T3 shell. The slices of the tomogram calculated from an EM tilt series proved the full encapsulation of three chikungunya VLPs in the selected shell particle. The last image slice showed a disruption of the triangles' connectivity. It was not clear if this discontinuity was due to the shell's rearrangement to encapsulate multiple VLPs or a consequence deforming on the grid during the sample preparation. Scale bar is 100 nm.

[0029] FIG. 14 shows TEM quantification of T1 shells trapping chikungunya VLPs with the 3a and 3b HS derivatives. a: negative stain TEM micrograph of T1 shells functionalized with the 3b negative control HS derivative. Due to the size and shape complementarity, weak electrostatic interactions in between the DNA and the chikungunya VLP were sufficient to keep the virus particles encapsulated when the negative control handles were used. Scale bar is 100 nm. b: TEM quantification of full vs. empty T1 shells functionalized with the 3a HS derivative on a H1 handle design. ˜90% of shells were full c: TEM quantification of full vs. empty T1 shells functionalized with the 3b negative control HS derivative on a H1 handle design. ˜54% of shells were full.

[0030] FIG. 15 shows TEM of immature and mature dengue 1 VLPs trapping with O shells. a: The immature configuration of the dengue VLPs showed no binding to the HS-modified origami shells. b: Mature dengue VLPs were recognized and encapsulated by the O shells. VLPs were used in excess. Scale bar is 100 nm.

[0031] FIG. 16 shows Cryo-EM imaging of O shells trapping HPV 16 particles (EMD-13884). a: Exemplary micrograph of O shells trapping HPV 16 vitrified on lacey carbon grids with ultrathin carbon support. b: 2D class averages of empty shells (left), HPV 16 trapped by one O shell (middle), and two O shells trapping an HPV 16 (right). c: 3D classes of selected particles showing similar particles as in b. d: 3D reconstruction of HPV 16 particles trapped in one O shell. e: Multibody refinement of HPV 16 particles encapsulated by two O shells. f+g: Multi-component analysis of two O shells trapping an HPV 16.

[0032] FIG. 17 shows Cryo-EM imaging of T1 shells trapping chikungunya VLPs (EMD-13883). a: Exemplary micrograph of T1 shells trapping chikungunya VLPs vitrified on lacey carbon grids with ultrathin carbon support. b: 2D class averages of extracted particles. c: FSC estimation of the reconstruction shown in e (C5). d: 3D classification of extracted particles. e: 3D reconstruction of T1 shells trapping chikungunya of selected particles from multiple rounds of 3D classification without (C1) and with symmetry (C5).

[0033] FIG. 18 shows 2D class averages of free HPV 16 VLPs extracted from cryo-EM images. The HPV 16 VLPs' diameter ranged from 35 nm to 50 nm.

[0034] FIG. 19 shows the stability of virus trapping by the shells. TEM quantification of AAV2 trapping in O shells subjected to a dilution series. The fraction of occupied shells remained the same prior and after 100-fold dilution and incubation for 14 days at RT in the diluted sample relative to the non-diluted sample. The overall shell concentration was 0.072 nM.

[0035] FIG. 20 shows TEM of rubella protein debris trapping in T1 shells. Successful encapsulation of protein debris from the rubella VLP sample.

[0036] FIG. 21 shows the results of negative stain TEM imaging of a virus cocktail trapping with heparan sulfate-modified T1 half-shells. (A,B) TEM fields of view of T1 half-shells trapping AAV2, Chikungunya and HPV16 virus particles in different ratios, with homogeneous and heterogeneous complexes. Selected trapped virus particles as (C) one Chikungunya, (D) one HPV16, (E) one AAV2, (F top) several AAV2, (F bottom) HPV16-Chik, (G) AAV2-Chik, (H) AAV2-HPV16. All scale bars: 100 nm.

[0037] FIG. 22 shows the cooperative effect of multiple O shells capturing numerous AAV2 particles. Scale bar: 50 nm.

### DETAILED DESCRIPTION OF THE INVENTION

[0038] The present disclosure provides constructs that enable the encapsulation of viruses or viral particles.

[0039] Unless defined otherwise, all technical and scientific terms used herein have the same meaning as commonly understood by those of ordinary skill in the art to which this invention pertains.

[0040] The terms “comprising” and “including” are used herein in their open-ended and non-limiting sense unless otherwise noted. With respect to such latter embodiments, the term “comprising” thus includes the narrower term “consisting of”.

[0041] The terms “a” and “an” and “the” and similar references in the context of describing the invention (especially in the context of the following claims) are to be construed to cover both the singular and the plural, unless otherwise indicated herein or clearly contradicted by context. For example, the term “a cell” includes a plurality of cells, including mixtures thereof. Where the plural form is used for compounds, salts, and the like, this is taken to mean also a single compound, salt, or the like.

[0042] Therefore, in one aspect, the present invention relates to a DNA-based nanostructure, wherein said DNA-based nanostructure is a shell comprising a cavity enclosed by said DNA-based nanostructure, wherein said DNA-based nanostructure is formed by self-assembling DNA-based building blocks, wherein each of said self-assembling DNA-based building blocks is formed by a single-stranded DNA template strand and a set of oligonucleotides complementary to said single-stranded DNA template, wherein each of said oligonucleotides is either complementary to one contiguous DNA sequence stretch or to at least two non-contiguous DNA sequence stretches on said single-stranded DNA template, wherein each of said self-assembling DNA-based building blocks is a triangular and/or a rectangular prismoid, particularly a triangular prismoid, and wherein a subset of one or more of said oligonucleotides in one or more of said self-assembling DNA-based building blocks is/are each linked to a construct comprising at least one sulfonated or sulfated polysaccharide group pointing to the interior of said cavity, particularly a construct comprising one or two sulfonated or sulfated polysaccharide groups, wherein each said construct comprises (i) a handle comprising at least one binding site for said sulfonated or sulfated polysaccharide group, and (ii) said sulfonated or sulfated polysaccharide group(s) bound to said handle.

[0043] In an alternative embodiment, a subset of one or more of said oligonucleotides in one or more of said self-assembling DNA-based building blocks is linked to a construct comprising at least one sialic acid group pointing to the interior of said cavity, particularly a construct comprising one or two sialic acid groups.

[0044] In particular embodiments, said handle has a length corresponding to at least the length of a single-stranded oligonucleotide comprising 30 nucleotides.

[0045] By using such extended versions of the linking moieties, it could surprisingly be shown that the number of DNA-based nanostructures that actually encapsulated a virus particle was drastically increased.

[0046] In the context of the present disclosure, the term “DNA-based nanostructure” refers to a nanostructure that is formed by a set of DNA-based macromolecules. DNA-based nanostructure of the type used in accordance with the present invention are described in detail in of WO 2021/165528 and in Sigl et al., loc. cit.

[0047] In the context of the present disclosure, the term “DNA” refers to deoxyribonucleic acid composed of a single-strand of monomeric units called nucleotides, wherein each nucleotide is composed of a nitrogen-containing nucleobase, a 2-deoxyribose sugar moiety, and a phosphate group, wherein the individual nucleotides are linked in the single-strand by a phosphate group linking the OH group in position 5′ of a 2-deoxyribose sugar moiety to the OH group in 3′ of a neighboring 2-deoxyribose sugar moiety. In particular embodiments, the nitrogen-containing nucleobases are independently selected from cytosine [C], guanine [G], adenine [A] and thymine [T]. In particular embodiments, one or more of the nucleobases are non-canonical bases, in particular a non-canonical base selected from the list of: a modified adenosine, in particular N6-carbamoyl-methyladenine or N6-methyadenine; a modified guanine, in particular 7-deazaguanine or 7-methylguanine; a modified cytosine, N4-methylcytosine, 5-carboxylcytosine, 5-formylcytosine, 5-glycosylhydroxymethylcytosine, 5-hydroxycytosine, or 5-methylcytosine; a modified thymidine, in particular α-glutamyl thymidine or α-putrescinyl thymine; a uracil or a modification thereof, in particular uracil, base J, 5-dihydroxypentauracil; or 5-hydroxymethyldeoxyuracil; deoxyarchaeosine and 2,6-diaminopurine. A stretch of a single strand of DNA may interact with a complementary stretch of DNA by interaction of complementary nucleobases, wherein cytosine and guanine, and adenine and thymine, are complementary to each other, respectively by forming two (A/T) and three (G/C) hydrogen bonds between the nucleobases. Two single-strands of DNA may be fully complementary to each other, as in the case of genomic DNA, or may be partially complementary to each other, including situations, where one single-strand of DNA is partially complementary to two or more other single-stranded DNA strands. The interaction of two complementary single-stranded DNA sequences results in the formation of a double-stranded DNA double helix.

[0048] As is well known, DNA has evolved in nature as carrier of the genetic information encoding proteins. DNA further includes non-coding regions that include regions having regulatory functions. Thus, any DNA-based application usually critically depends on the specific DNA sequence and is almost always only enabled by naming the specific DNA sequence. In contrast, in the context of the present invention, such coding and/or regulatory functions do not play any role and may or may not be present, since the underlying DNA sequences are solely designed and selected in a way that the desired arrangement of double-helical subunits is formed.

[0049] Thus, in one embodiment any form of a long single-stranded DNA sequence, whether naturally occurring DNA (such as the DNA of a bacteriophage) or synthetically produced DNA may be selected as template, and a set of short single-stranded DNA sequences may be designed, wherein each sequence is complementary to one or more different parts of the template and thus forms one or more double-helical sections. Collectively, all such double-helical sections created by interaction of the full set of short single-stranded DNA sequences with the template, then form the desired three-dimensional arrangement. Starting from a given single-stranded template sequence, the design of a set of complementary can be set up using known techniques, such as, for example, the methods described for the synthesis of megadalton-scale discrete objects with structurally well-defined 3D shapes (18, 24-35). In particular, iterative design with caDNAno (37) paired with elastic-network-guided molecular dynamics simulations (38) can be used.

[0050] In addition to the interaction of complementary nucleobases of different stretches of single-stranded DNA via hydrogen bonds, additional interactions between different DNA strands are possible, including the stacking interactions between the blunt ends of two double-stranded DNA helices (36), thus enabling the design and the formation of complex DNA-based nanostructures via the shape-complementarity of double-helical subunits. Thus, two three-dimensional arrangements formed in accordance with the previous paragraph, may interact with each other by stacking interactions between double-helical subunits present on the two three-dimensional arrangements, including specific interactions between two three-dimensional arrangements having complementary protrusions and recessions (or knobs and holes), as shown, for example, in FIGS. 7-13D of WO 2021/165528.

[0051] In an alternative aspect of the present invention, the invention relates to a macromolecule-based nanostructure, which is an RNA-based nanostructure.

[0052] In the context of the present disclosure, the term “RNA” refers to ribonucleic acid composed of a single-strand of monomeric units called nucleotides, wherein each nucleotide is composed of a nitrogen-containing nucleobase, a ribose sugar moiety, and a phosphate group, wherein the individual nucleotides are linked in the single-strand by a phosphate group linking the OH group in position 5′ of a ribose sugar moiety to the OH group in 3′ of a neighboring ribose sugar moiety. In particular embodiments, the nitrogen-containing nucleobases are independently selected from cytosine [C], guanine [G], adenine [A] and uracil [U]. In particular embodiments, one or more of the nucleobases are non-canonical bases, in particular a non-canonical base selected from the list of: pseudouridine, ribothymidine, and inosine. Unlike DNA, RNA is most often in a single-stranded form, but the formation of double-stranded forms is possible by interaction of complementary nucleobases, wherein cytosine and guanine, and adenine and uracil, are complementary to each other, respectively by forming two (A/U) and three (G/C) hydrogen bonds between the nucleobases.

[0053] In the context of the present invention, the term “cavity” relates to the space enclosed by said DNA-based nanostructure. In particular embodiments, said cavity resembles a sphere, where a spherical segment has been cut off, with the cutting plane being formed by the self-assembling DNA-based building blocks at the borders of said DNA-based nanostructure. In particular embodiments, the cutting plane is a great circle so that the DNA-based nanostructure is a half-shell. In other cases, where the three-dimensional geometric shape of said DNA-based nanostructure is derived from a spherocylinder or a polyhedron, in particular a tetrahedron, an octahedron or an icosahedron, said cavity is to be understood as the space resulting from cutting a corresponding spherocylinder or polyhedron by a plane with the cutting plane being formed by the self-assembling DNA-based building blocks at the borders of said DNA-based nanostructure.

[0054] In certain other embodiments, said DNA-based nanostructure resembles a spherical segment. Since in such embodiments, only part of a virus interacting with such DNA-based nanostructure is covered, the encapsulation of one or more viruses or viral particles in accordance with the present invention requires binding of two or more of such DNA-based nanostructures to said one or more viruses or viral particles.

[0055] In the context of the present application, the term “sulfonated or sulfated polysaccharide group” relates to a group comprising a polysaccharide comprising at least one sulfated hydroxy group or at least one sulfonated glycosylamino group.

[0056] Importantly, in addition to targeting specific receptors, many viruses also weakly interact with different biological substances, including sulfated of sulfonated polysaccharides (Cagno, V. et al., Viruses 11 (2019) 596; see Table 2).

[0057] In particular embodiments, each of said handles comprises two binding sites for said sulfonated or sulfated polysaccharide groups.

[0058] In particular embodiments, each of said polysaccharide comprising at least one sulfated hydroxy group or at least one sulfonated glycosylamino group is independently selected from the list of heparin, heparan sulfate, hybrid heparan sulfates, carrageenans, cellulose sulfate, and dextrin 2-sulfate, in particular a heparan sulfate or a hybrid heparan sulfate.

[0059] In particular embodiments, said polysaccharide comprising at least one sulfated hydroxy group or at least one sulfonated glycosylamino group consists of between 3 and 10 disaccharide units, in particular 4, 5, 6, 7, 8 of 9 units, particularly 4 or 9 monosaccharide units.

[0060] In particular embodiments, said disaccharide units comprise two or three O- and/or N-sulfonate groups per disaccharide unit, in particular three O- and/or N-sulfonate groups.

[0061] In particular embodiments, each of said sulfonated or sulfated polysaccharide groups is independently selected from the list of heparin, heparan sulfate, hybrid heparan sulfates, carrageenans, cellulose sulfate, and dextrin 2-sulfate.

[0062] In particular such embodiments, each of said sulfonated or sulfated polysaccharides is independently selected from a heparan sulfate and a hybrid heparan sulfate, in particular is a heparan sulfate.

[0063] In the context of the present invention, the terms “heparin” and “heparan sulfate” both relate to a family of linear sulfated, heterogeneous polysaccharides found on the cell membrane and in the extracellular matrix as part of heparan sulfate proteoglycans (HSPGs). They are composed of repeating 1→4 linked disaccharide units, in which one monosaccharide is an α-D-glucosamine residue and the other an uronic acid (or, in a salt form, an uronate). Heparin is a structurally similar polysaccharide found within mast cells as a component of serglycin proteoglycans. Heparan sulfate and heparin can be defined as follows: first, in heparin, the uronates are predominantly α-L-iduronate, whereas in heparan sulfate, the uronates are mainly, β-D-glucuronates, the C-5 epimers of α-L-iduronate. Second, in heparan sulfate, the D-glucosamine residues are predominantly N-acetylated, whereas in heparin, they are N-sulfonated. Finally, whereas at least 70-80% of heparin is composed of the disaccharide L-iduronate 2-O-sulfate a (1→4) D-glucosamine N,6-sulfate, in heparan sulfate around 40-60% of the disaccharides consist of (1→4) D-glucuronate β (1→4) D-glucosamine, that can be either N-acetylated or N-sulfonated. Together, these structural characteristics make heparin more sulfated and, hence, more charged than heparan sulfate. It has become apparent, however, that the designations heparin or heparan sulfate are less clear-cut than this description implies, and that polysaccharides isolated from some organisms appear to be hybrid constructs. In the context of the present invention, the term “hybrid heparan sulfate” is used to refer to such hybrids having structures being a mixture of the “typical” heparin structural elements (L-iduronates; high degree of sulfonation) and the “typical” heparan sulfate structural elements (D-glucuronate; N-acetylation and 6-O-sulfonation).

[0064] Heparan sulfate proteoglycans (HSPG) (Cagno, V. et al., Viruses 11 (2019) 596; Zhang, Q. et al., Cell Discov. 6 (2020) 1-14) are commonly found on the surface of mammalian cells. The weak interactions of viruses with HSPG are conserved across virus families and thus appear generically beneficial for the virus lifecycle. For example, HSPG-virus interactions may enable an infection-enhancing diffusive search of virus particles for their specific host cell receptors on the surface of cells (FIG. 1A, left panel). The interactions of heparan sulfate (HS) with viruses have already been exploited for medical purposes, for example in virus-sequestering coatings of condoms that are based on HS-decorated dendrimers (Tyssen, D. et al., PLOS ONE 5, e12309 (2010); Price, C. F. et al., PLOS ONE 6, e24095 (2011); Zelikin, A. N. & Stellacci, F., Adv. Healthc. Mater. 10 (2021) 2001433). Other investigations have frequently involved the surface functionalization of nanoparticles and polymers with HS derivatives to create virus-binding complexes with antiviral activity (Cagno, V. et al., Nat. Mater. 17 (2018) 195-203; Al-Mahtab, M. et al., PLOS ONE 11 (2016) e0156667; Vaillant, A., Antiviral Res. 133 (2016) 32-40; Cagno, V. et al., Antimicrob. Agents Chemother. 64 (2020) e02001-20). Commonly, a high level of multivalency is required to increase the strength of binding between the HS-nanoparticles and viruses. The reversible nature of the binding can lead to undesirable unbinding and release of infectious viruses from the virus-sequestering coatings, or the requirement for high concentrations of the therapeutically active agent to be maintained (Zelikin, loc. cit.).

[0065] In particular embodiments, said subset of self-assembling DNA-based building blocks consists of between 1 and 100% of all self-assembling DNA-based building blocks forming said DNA-based nanostructure. In particular embodiments, said subset of self-assembling DNA-based building blocks consists of between 50 and 100% of all self-assembling DNA-based building blocks forming said DNA-based nanostructure, more particularly between 75 and 100%, and in particular 100% of all self-assembling DNA-based building blocks.

[0066] In particular embodiments, one or more of said self-assembling DNA-based building blocks in said subset comprise n single-stranded oligonucleotides as said handles, wherein each handle is independently linked to at least one of said sulfonated or sulfated polysaccharide groups, wherein n is an integer independently selected from 1, 2, 3, 4, 5, 6, 7, 8, 9, 10, 11, and 12, particularly wherein n is 9.

[0067] In a particular embodiment, said handles are single-stranded oligonucleotides having a length of between 30 and 60 nucleotides, in particular between 40 and 55 nucleotides, more particularly between 45 and 50 nucleotides.

[0068] Examples of self-assembling DNA-building blocks in the form of frusta, wherein the small base of each of said frusta comprises nine of said polynucleotides are shown in the examples, for example T_octa self-assembling DNA-based building blocks, T1_pentamer_triangle self-assembling DNA-based building blocks, T1_ring_triangle self-assembling DNA-based building blocks or T3_6_triangle based self-assembling DNA-based building blocks.

[0069] In particular embodiments, each member of said n oligonucleotides comprises at least one oligonucleotide stretch as binding site, and wherein each of said sulfonated or sulfated polysaccharide groups comprises an oligonucleotide having a sequence that is complementary to one of said oligonucleotide stretches comprised in said handles. In particular embodiments, each member of said n oligonucleotides comprises one or two oligonucleotide stretches as binding sites.

[0070] In particular embodiments, each member of said n oligonucleotides comprises two oligonucleotide stretches as binding sites.

[0071] By using oligonucleotides comprising two binding sites, it could surprisingly be shown that the number of DNA-based nanostructures that actually encapsulated a virus particle was further increased, even when compared to the already advantageous version with an extended handle design described above. This is particularly surprising in light of the fact that the additional second binding site is at the same position as the initial binding site in the H1 handle design with a short oligonucleotide (26-mer) and despite the fact that the addition of a second binding site and HS moiety might have been expected to decrease the encapsulation efficiency due to steric hindrance.

[0072] Examples of subsets of nine of such oligonucleotide handles, which can be linked to constructs comprising a sulfonated or sulfated polysaccharide group, can be found in the sets of Hx oligos according to SEQ ID. NOs: 177-185, 186-194, 389-397, 398-406, 607-615, 616-624, 821-829, 1018-1026, 1216-1224, 1416-1424, 1613-1621, and 1812-1820, each oligo comprising one handle, and the sets of Hx oligos according to SEQ ID. NOs: 195-203, 407-415, and 625-633, each oligo comprising two binding sites.

[0073] In a particular embodiment, said cavity has a diameter of at least 15 m, at least 25 nm, at least 50 nm, at least 100 nm, at least 150 nm, at least 200 nm or at least 250 nm.

[0074] In particular embodiments, said cavity has a diameter of at most 1,000 nm.

[0075] In the context of the present invention, the term “diameter” refers to the diameter of the smallest circle that is encompassed by the surface of the DNA-based nanostructure. For the sake of clarity, in the case of a DNA-based nanostructure in the form of a capsule (or spherocylinder), the diameter is the diameter of the hemispherical ends and/or the diameter of the cylindrical central part.

[0076] In a particular embodiment, the DNA-based nanostructure has a molecular mass of at least 1 MDa, particularly at least 10 MDa, particularly at least 20 MDa, more particularly at least 30 MDa. In other particular embodiments, the DNA-based nanostructure has a molecular mass of at least 50 MDa, at least 80 MDa, at least 100 MDa, at least 200 MDa, or at least 500 MDa. In particular embodiments, the DNA-based nanostructure has a molecular mass of at most 1,500 MDa.

[0077] In particular embodiments, the ratio between the numerical value of the molecular mass of the DNA-based nanostructure (in MDa) and the numerical value of the volume of the cavity encased by said DNA-based nanostructure (in nm³) is less than 10,000, particularly less than 9,000. In particular embodiments said ratio has a value of between 1,000 and 10,000, particularly between 2,000 and 9,000. For example, in the case of certain octahedral nanostructures, where the molecular mass is about 40 MDa, and where the encased volume is about 113,000 nm³, said ratio is about 2,800.

[0078] In particular embodiments, the ratio between the outer surface area of the DNA-based nanostructure covered by the macromolecules forming said DNA-based nanostructure and the outer surface area not covered by said macromolecules (excluding the area of the opening of a DNA-based nanostructure in the form of a shell) is at least 1, in particular at least 2, in particular at least 4, in particular at least 6, in particular at least 8. In other particular embodiments, the ratio is at least 10. In particular embodiments, the ratio is between 1 and 20, in particular between 2 and 18, between 4 and 16, between 6 and 14, and more particularly between 8 and 12. For example, in a case, where the DNA-based nanostructure is a shell in the form of a half sphere, only the area of the curved surface, but not that of the opening, i.e. the area of the flat face of the half sphere, is used for calculating said ratio.

[0079] In a particular embodiment, the molecular weight of each self-assembling DNA-based building block is between 4.5 and 5.5 MDa.

[0080] In a particular embodiment, each self-assembling DNA-based building block comprises between 7,500 and 8,500 base pairs.

[0081] In a particular embodiment, the DNA-based nanostructure consists of between 4 and 180 of such self-assembling DNA-based building blocks.

[0082] In particular embodiments, said single-stranded DNA template is single-stranded DNA of filamentous bacteriophage, or is derived from single-stranded DNA of filamentous bacteriophage.

[0083] In the context of the present invention, the term “filamentous bacteriophage” refers to a type of bacteriophage, or virus of bacteria, which is characterized by its filament-like shape that usually contains a genome of circular single-stranded DNA and infects Gram-negative bacteria. Filamentous phage includes Ff phage, such as M13, f1 and fd1 phage, and Pf1 phage.

[0084] In particular embodiments, said single-stranded DNA template has the sequence of SEQ ID NO: 1 (M13 8064) (see Table 1). In particular embodiments, said single-stranded DNA is circular.

[0085] In the context of the present invention, a single-stranded DNA template that is “derived from single-stranded DNA of filamentous bacteriophage” refers to a DNA construct that is derived from a naturally occurring of published DNA sequence of a filamentous bacteriophage by one or more of: (i) opening of the circular structure to a linear sequence; (ii) deletion of one or more nucleotides; (iii) insertion of one or more nucleotides; (iii) substitution of one or more nucleotides; (iv) addition of one or more nucleotides; and (v) modification of one or more nucleotides. While any such variation might have detrimental, or at least rather unpredictable, effects on bacteriophage biology, its infectivity and its ability to propagate, such effects do not play any role in the context of the present invention, since, as already mentioned above, said single-stranded DNA template is only used as naked template without any requirement for having any functional property, and all structural aspects, such as the correct formation the three-dimensional shape of said self-assembling DNA-based building blocks, are implemented by the proper choice of said set of complementary oligonucleotides.

[0086] In particular embodiments, said single-stranded DNA template has at least 80%, particularly at least 90%, more particularly at least 95%, sequence identity to the sequence of a naturally occurring or published sequence of a filamentous bacterio-phage, in particular to a M13, f1 or fd1 phage, in particular to a sequence selected from SEQ ID NO: 1 (M13 8064) and M13 7249 (SEQ ID NO: 2 of WO 2021/165528).

[0087] In a particular embodiment, the DNA-based nanostructure is a closed three-dimensional geometric shape, in particular a closed three-dimensional geometric shape selected from a sphere, a spherocylinder, and a polyhedron, in particular a tetrahedron, an octahedron or an icosahedron, formed in situ from said self-assembling DNA-based building blocks in the presence of said viruses or viral particles to be encapsulated.

[0088] In a particular such embodiments, said self-assembling DNA-based building blocks forming said DNA-based nanostructure in situ are a collection of individual DNA-based building blocks, each comprising a single single-stranded DNA template.

[0089] In particular other embodiments, said self-assembling DNA-based building blocks forming said DNA-based nanostructure in situ are a collection of one or more preassembled DNA-based building blocks consisting of two or more individual DNA-based building blocks, each comprising a single single-stranded DNA template.

[0090] In certain embodiments, all of said self-assembling DNA-based building blocks are preassembled DNA-based building blocks. In an alternative embodiment, said self-assembling DNA-based building blocks are a mixture of preassembled DNA-based building blocks and of individual DNA-based building blocks, each comprising a single single-stranded DNA template.

[0091] In such embodiments, said preassembled DNA-based building blocks form a curved geometrical shape, wherein said handles or said constructs comprising at least one sulfonated or sulfated polysaccharide group, which are linked to said handles, are present on the negative curvature of said curved geometrical shape, so that said handles or constructs are pointing to the interior of the cavity formed from the self-assembly of said preassembled DNA-based building blocks.

[0092] In another particular embodiment, the DNA-based nanostructure is a shell with an opening for accessing said cavity.

[0093] In the context of the present invention, the term “shell” refers to a structure that is a part of a closed three-dimensional geometric shape, in particular a closed three-dimensional geometric shape selected from a sphere, a spherocylinder, and a polyhedron, in particular a tetrahedron or an octahedron,

[0094] In yet another particular embodiment, the DNA-based nanostructure is a combination of a first subshell and a second subshell, each with an opening to access a first and a second inner cavity, respectively, wherein said first and said second inner cavity together form said cavity.

[0095] In a particular embodiment, said first and said second subshells are connected by at least one linker.

[0096] In particular embodiments, said linker is a linker selected from a DNA linker, an RNA linker, a polypeptide linker, a protein linker and a chemical linker.

[0097] In the context of the present invention, the term “DNA linker” refers to a linker formed from DNA, wherein the sequence of said DNA linker is not complementary to the DNA of said single-stranded DNA template or to any of said set of oligonucleotides complementary to said single-stranded DNA template, wherein said DNA linker is linked at one terminus to a DNA sequence forming a self-assembling DNA-based building block of said first shell, and at the other terminus to a DNA sequence forming a self-assembling DNA-based building block of said second shell.

[0098] In the context of the present invention, the term “polypeptide linker” refers to a linker formed from at least 2, particularly at least 5, at least 10, or at least 20 amino acid residues linked by peptide bonds, wherein said polypeptide has no tertiary or quaternary structure, and wherein said polypeptide linker is linked at one terminus to a DNA sequence forming a self-assembling DNA-based building block of said first shell, and at the other terminus to a DNA sequence forming a self-assembling DNA-based building block of said second shell.

[0099] In the context of the present invention, the term “protein linker” refers to a linker formed from at least 20, particularly at least 50, at least 100, at least 200 amino acid residues, at least 500 amino acid residues, or at least 1,000 amino acid residues, particularly less than 1,500 amino acid residues linked by peptide bonds, wherein said polypeptide has tertiary and/or quaternary structure, and wherein said protein linker is linked at one terminus to a DNA sequence forming a self-assembling DNA-based building block of said first shell, and at the other terminus to a DNA sequence forming a self-assembling DNA-based building block of said second shell. In particular embodiments, said protein linker is covalently attached to said DNA sequences. In particular other embodiments, said protein linker is non-covalently attached to said DNA sequences, in particular, wherein said protein linker is an antibody-based protein linker, in particular selected from a diabody and a full antibody, including an IgG antibody.

[0100] In the context of the present invention, the term “chemical linker” refers to a continuous chain of between 1 and 30 atoms (e.g. 1, 2, 3, 4, 5, 6, 7, 8, 9, 10, 11, 12, 13, 14, 15, 16, 17, 18, 19, 20, 21, 22, 23, 24, 25, 26, 27, 28, 29, or 30 atoms; thus, in the context of the present invention, the term “between” is used so that the borders mentioned are included) in its backbone, i.e. the length of the linker is defined as the shortest connection as measured by the number of atoms or bonds between the two DNA sequences linked by said chemical linker. In the context of the present invention, a chemical linker preferably is an C₁₋₂₀-alkylene, C₁₋₂₀-heteroalkylene, C₂₋₂₀-alkenylene, C₂₋₂₀-heteroalkenylene, C₂₋₂₀-alkynylene, C₂₋₂₀-heteroalkynylene, cycloalkylene, heterocycloalkylene, arylene, heteroarylene, aralkylene, or a heteroaralkylene group, which may optionally be substituted. The linker may contain one or more structural elements such as carboxamide, ester, ether, thioether, disulfide, urea, thiourea, hydrocarbon moieties and the like. The linker may also contain combinations of two or more of these structural elements. Each one of these structural elements may be present in the linker more than once, e.g. twice, three times, four times, five times, or six times. In some embodiments the linker may comprise a disulfide bond. It is understood that the linker has to be attached either in a single step or in two or more subsequent steps to the two DNA sequences linked by said chemical linker. To that end the linker to be will carry two groups, preferably at a proximal and distal end, which can (i) form a covalent bond to a group present in one of the two DNA sequences to be linked, or (ii) which is or can be activated to form a covalent bond with one of the two DNA sequences.

[0101] In a particular embodiment, the DNA-based nanostructure is based on an icosahedral structure.

[0102] In a particular embodiment, each of said self-assembling DNA-based building blocks is a prismoid.

[0103] In the context of the present invention, the term “prismoid” refers to a polyhedron, wherein all vertices lie in two parallel planes.

[0104] In particular embodiments, said prismoid is a triangular prismoid. In other embodiments, said prismoid is a rectangular prismoid.

[0105] In particular embodiments, the DNA-based nanostructure is based on a mixture of a triangular and a rectangular prismoid.

[0106] In a particular embodiment, the present invention relates to a DNA-based nanostructure, wherein each said triangular, or said rectangular prismoid, is formed by m triangular, or rectangular, respectively, planes, wherein m is an integer independently selected from 4, 5, 6, 7 and 8, in particular independently selected from 5, 6 and 7, more particularly wherein said integer is 6.
[0107] wherein the three, or four, respectively, edges of each of said m planes are formed by n parallel stretches of DNA double helices, wherein n is an integer independently selected from 1, 2, 3, 4, 5 and 6 in particular independently selected from 2, 3, 4 and 5, more particularly independently selected from 3 and 4,
[0108] wherein each plane is connected to a plane above and/or a plane beyond said plane (i) by stacking interactions between the DNA double helices forming said planes, and (ii) partially by DNA stretches within said single-stranded DNA template and/or said oligonucleotides forming said DNA-based building block bridging at least two of said planes, and
[0109] wherein at least two of the three, or four, respectively, side trapezoids comprise a specific pattern of recesses and/or extrusions formed by missing or additional DNA double helical stretches for specific interaction with a complementary pattern on the side trapezoid of another one of said self-assembling DNA-based building blocks.

[0110] In a particular embodiment, the average length of each of the n stretches of DNA double helices in the m planes of a triangular, or rectangular, respectively, prismoid is between 80 and 200 base pairs.

[0111] In particular embodiments, said triangular prismoid is a triangular frustum. In particular embodiments, said rectangular prismoid is a rectangular frustum.

[0112] In the context of the present invention, the term “triangular frustum” refers to a three-dimensional geometric shape in the form of a triangular pyramid, and the term “rectangular frustum” refers to a three-dimensional geometric shape in the form of a rectangular pyramid, where the tip of the pyramid has been removed resulting in a plane on the top parallel to the basis of the pyramid.

[0113] In a particular embodiment, for at least part of said self-assembling DNA-based building blocks the length of at least one edge of each of said m planes is decreasing from the first to the m^{th} plane, so that a bevel angle results between planes perpendicular to said first plane and the trapezoid plane formed by said m edges (see FIG. 5 of WO 2021/165528). In particular embodiments, all three, or four, respectively, trapezoid planes exhibit a bevel angle.

[0114] In a particular embodiment, a bevel angle is between 16° and 26°, particularly between 18° and 24°, more particularly between 20° and 22°, most particularly about 20.9°.

[0115] In a particular embodiment, said DNA-based nanostructure comprises at least one set of self-assembling DNA-based building blocks, wherein all three, or four, respectively, side trapezoids comprise a specific pattern of recesses and/or extrusions formed by missing or additional DNA double helical stretches for specific interaction with a complementary pattern on the side trapezoid of another one of said self-assembling DNA-based building blocks.

[0116] In a particular embodiment, particularly in the case of a DNA-based nanostructure closed three-dimensional geometric shape, all said self-assembling DNA-based building blocks are identical.

[0117] In a particular embodiment, said DNA-based nanostructure comprises two or more sets of self-assembling DNA-based building blocks.

[0118] In a particular embodiment, said DNA-based nanostructure is rod-shaped.

[0119] In particular embodiments, said DNA-based nanostructure comprises two or more sets of self-assembling DNA-based building blocks.

[0120] In particular such embodiment, said rod-shaped DNA-based nanostructure comprises at least a first and a second set of self-assembling DNA-based building blocks, wherein said first and set second set differ at least with respect to the bevel angles. In a particular embodiment, at least one set consists of self-assembling DNA-based building blocks exhibiting only two bevel angles. In a particular embodiment, said at least one set consists of rectangular frusta, which comprise a bevel angle on each of two opposing trapezoids.

[0121] In a particular embodiment, the side trapezoids forming the rim of said shell, or of said first and second shell, respectively, do not comprise a specific pattern of recesses and/or extrusions formed by missing or additional DNA double helical stretches for specific interaction with a complementary pattern on the side trapezoid of another one of said self-assembling DNA-based building blocks.

[0122] In a particular embodiment, said DNA-based nanostructure is a shell selected from
[0123] (i) a half octahedron T_octa (FIG. 4A of WO 2021/165528), which consists of a set of four copies of a triangular frustum, wherein the base-pair stacking contacts on one of the triangular edges of the triangular frustum are inactivated by either strand shortening or by adding unpaired thymidines (FIG. 4A of WO 2021/165528, see FIG. 24A,D of WO 2021/165528);
[0124] (ii) a half T=1 shell (FIG. 4B of WO 2021/165528), which consists of two sets of in each case five copies of two different triangular frusta, wherein the five copies of the first set form a closed pentamer, and the five copies of the second set dock onto the edges of said pentamer (FIG. 4B of WO 2021/165528, see FIG. 24B,E of WO 2021/165528); and
[0125] (iii) a “trap” T=1 shell with a missing pentagon vertex (FIG. 4C of WO 2021/165528), which consists of three sets of in each case five copies of three different triangular frusta, wherein the five copies of the first set form a closed pentamer, the five copies of the second set dock onto the edges of said pentamer the five copies of the second set dock onto the edges of said pentamer, and the five copies of the third set dock into the gaps between the five copies of said second set (FIG. 4C of WO 2021/165528, see FIG. 24C,F of WO 2021/165528);
[0126] (iv) a T=3 icosahedral half shell, which consists of a total of 30 triangular subunits partitioned as five copies of six different full-size DNA triangle designs with specific edge docking rules

[0127] In a particular embodiment, the present invention relates to a DNA-based nanostructure further comprising one or more types of DNA brick constructs, each type of such DNA brick constructs being characterized by one or more interaction sites for specific interaction by edge-to-edge stacking contacts with one or more complementary interaction sites present on the plane of said triangular, or rectangular, respectively, prismoid on the outer surface of said DNA-based nanostructure, wherein said DNA brick constructs cover the free space between the three, or four, respectively, edges of said plane (see FIG. 33 of WO 2021/165528).

[0128] In a particular embodiment, the present invention relates to a DNA-based nanostructure further comprising one or more cross-linkages within one of said triangular, or rectangular, respectively, prismoids, and/or between two of said triangular, or rectangular, respectively, prismoids.

[0129] In the context of the present invention, the term “cross-linkage” refers to any permanent or intermittent linkage within one of said triangular, or rectangular, respectively, prismoids, and/or between two of said triangular, or rectangular, respectively, prismoids. Any such linkage may be achieved a priori by linking two of the oligonucleotides being used for forming the self-assembling DNA-based building blocks prior to the assembly, or a priori, e.g. by chemically or photochemically adding linkages between different parts of the three-dimensional nanostructure. Permanent linkages may, for example, be created by photochemically cross-linking T residues appropriately positioned in the structure under formation of covalent cyclobutane pyrimidine dimer (CPD) bonds (41), and intermittent linkages may, for example, be created by photochemically cross-linking the blunt ends of two double-helical subunits between a 3-cyanovinylcarbazole (cnvK) moiety positioned at a first blunt end and a thymine residue (T) positioned at the other blunt end (40).

[0130] In a second aspect, the present invention relates to a composition comprising a DNA-based nanostructure according to the present invention encapsulating one or more viruses or viral particles.

[0131] In particular embodiments, said composition is formed in a process of removing said viruses or viral particles from a medium containing said viruses or viral particles. In particular other embodiments, said composition is formed in a process of incorporating said one or more viruses or viral particles as cargo in said DNA-based nanostructure.

[0132] In a third aspect, the present invention relates to a method for encapsulating a one or more viruses or viral particles, comprising the steps of: providing a DNA-based nanostructure according to the present invention, and contacting said DNA-based nanostructure with a medium comprising, or suspected to comprise, said viruses or viral particles.

[0133] In particular embodiments, (i) a DNA-based half shell nanostructure based on T_octa self-assembling DNA-based building blocks is selected for a virus of a size up to 50*50*50 nm³; (ii) a DNA-based half shell nanostructure based on T1_pentamer_triangle self-assembling DNA-based building blocks is selected for a virus of a size between 15*15*15 and 100*100*100 nm³; (iii) a DNA-based half shell nanostructure based on a combination of T1_pentamer_triangle and T1_ring_triangle self-assembling DNA-based building blocks is selected for a virus of a size between 15*15*15 and 100*100*100 nm³; and/or (iv) a DNA-based half shell nanostructure based on T3_6_triangle self-assembling DNA-based building blocks is selected for a virus of a size of 50*50*50 nm³ or larger.

[0134] In particular embodiments, said method is for removing said one or more viruses or viral particles from said medium. In particular embodiment, said method is for encapsulating said one or more viruses or viral particles in order to transport said virus or viral particle.

[0135] In a fourth aspect, the present invention relates to a method for encapsulating one or more viruses or viral particles, comprising the steps of: providing a DNA-based nanostructure according to the present invention, and contacting said DNA-based nanostructure with a medium comprising, or suspected to comprise, said viruses or viral particles.

[0136] In an alternative aspect, the disclosure provides a method for encapsulating one or more viruses or viral particles, comprising the steps of: adding self-assembling DNA-based building blocks to a medium comprising, or suspected to comprise, said viruses or viral particles resulting in the in situ formation of DNA-based nanostructure according to the present invention encapsulating one or more of said viruses or viral particles.

[0137] In yet another aspect, the disclosure provides a method for encapsulating a cargo different from a virus or viral particle, such as a complex macromolecule, comprising the steps of: providing a DNA-based nanostructure according to the present invention, and contacting said DNA-based nanostructure with a medium comprising, or suspected to comprise, said cargo.

[0138] In an alternative aspect, the disclosure provides a method for encapsulating cargo different from a virus or viral particle, such as a complex macromolecule, comprising the steps of: adding self-assembling DNA-based building blocks to a medium comprising, or suspected to comprise, said cargo different from a virus or viral particle, such as a complex macromolecule, resulting in the in situ formation of DNA-based nanostructure according to the present invention encapsulating said cargo different from a virus or viral particle, such as a complex macromolecule . . .

TABLE 1
M13 8064 Template Sequence

| SEQ ID | |
|---|---|
| NO: | Sequence |
| 1 | GGCAATGACCTGATAGCCTTTGTAGATCTCTCAAAAATAGCTACCCTCTCCGGCATTAATTTATCAGCTAGAA |
| | CGGTTGAATATCATATTGATGGTGATTTGACTGTCTCCGGCCTTTCTCACCCTTTTGAATCTTTACCTACACA |
| | TTACTCAGGCATTGCATTTAAAATATATGAGGGTTCTAAAAATTTTTATCCTTGCGTTGAAATAAAGGCTTCT |
| | CCCGCAAAAGTATTACAGGGTCATAATGTTTTTGGTACAACCGATTTAGCTTTATGCTCTGAGGCTTTATTGC |
| | TTAATTTTGCTAATTCTTTGCCTTGCCTGTATGATTTATTGGATGTTAATGCTACTACTATTAGTAGAATTGA |
| | TGCCACCTTTTCAGCTCGCGCCCCAAATGAAAATATAGCTAAACAGGTTATTGACCATTTGCGAAATGTATCT |
| | AATGGTCAAACTAAATCTACTCGTTCGCAGAATTGGGAATCAACTGTTATATGGAATGAAACTTCCAGACACC |
| | GTACTTTAGTTGCATATTTAAAACATGTTGAGCTACAGCATTATATTCAGCAATTAAGCTCTAAGCCATCCGC |
| | AAAAATGACCTCTTATCAAAAGGAGCAATTAAAGGTACTCTCTAATCCTGACCTGTTGGAGTTTGCTTCCGGT |
| | CTGGTTCGCTTTGAAGCTCGAATTAAAACGCGATATTTGAAGTCTTTCGGGCTTCCTCTTAATCTTTTTGATG |
| | CAATCCGCTTTGCTTCTGACTATAATAGTCAGGGTAAAGACCTGATTTTTGATTTATGGTCATTCTCGTTTTC |
| | TGAACTGTTTAAAGCATTTGAGGGGGATTCAATGAATATTTATGACGATTCCGCAGTATTGGACGCTATCCAG |
| | TCTAAACATTTTACTATTACCCCCTCTGGCAAAACTTCTTTTGCAAAAGCCTCTCGCTATTTTGGTTTTTATC |
| | GTCGTCTGGTAAACGAGGGTTATGATAGTGTTGCTCTTACTATGCCTCGTAATTCCTTTTGGCGTTATGTATC |
| | TGCATTAGTTGAATGTGGTATTCCTAAATCTCAACTGATGAATCTTTCTACCTGTAATAATGTTGTTCCGTTA |
| | GTTCGTTTTATTAACGTAGATTTTTCTTCCCAACGTCCTGACTGGTATAATGAGCCAGTTCTTAAAATCGCAT |
| | AAGGTAATTCACAATGATTAAAGTTGAAATTAAACCATCTCAAGCCCAATTTACTACTCGTTCTGGTGTTTCT |
| | CGTCAGGGCAAGCCTTATTCACTGAATGAGCAGCTTTGTTACGTTGATTTGGGTAATGAATATCCGGTTCTTG |
| | TCAAGATTACTCTTGATGAAGGTCAGCCAGCCTATGCGCCTGGTCTGTACACCGTTCATCTGTCCTCTTTCAA |
| | AGTTGGTCAGTTCGGTTCCCTTATGATTGACCGTCTGCGCCTCGTTCCGGCTAAGTAACATGGAGCAGGTCGC |
| | GGATTTCGACACAATTTATCAGGCGATGATACAAATCTCCGTTGTACTTTGTTTCGCGCTTGGTATAATCGCT |
| | GGGGGTCAAAGATGAGTGTTTTAGTGTATTCTTTTGCCTCTTTCGTTTTAGGTTGGTGCCTTCGTAGTGGCAT |
| | TACGTATTTTACCCGTTTAATGGAAACTTCCTCATGAAAAAGTCTTTAGTCCTCAAAGCCTCTGTAGCCGTTG |
| | CTACCCTCGTTCCGATGCTGTCTTTCGCTGCTGAGGGTGACGATCCCGCAAAAGCGGCCTTTAACTCCCTGCA |
| | AGCCTCAGCGACCGAATATATCGGTTATGCGTGGGCGATGGTTGTTGTCATTGTCGGCGCAACTATCGGTATC |
| | AAGCTGTTTAAGAAATTCACCTCGAAAGCAAGCTGATAAACCGATACAATTAAAGGCTCCTTTTGGAGCCTTT |
| | TTTTTGGAGATTTTCAACGTGAAAAAATTATTATTCGCAATTCCTTTAGTTGTTCCTTTCTATTCTCACTCCG |
| | CTGAAACTGTTGAAAGTTGTTTAGCAAAATCCCATACAGAAAATTCATTTACTAACGTCTGGAAAGACGACAA |
| | AACTTTAGATCGTTACGCTAACTATGAGGGCTGTCTGTGGAATGCTACAGGCGTTGTAGTTTGTACTGGTGAC |
| | GAAACTCAGTGTTACGGTACATGGGTTCCTATTGGGCTTGCTATCCCTGAAAATGAGGGTGGTGGCTCTGAGG |
| | GTGGCGGTTCTGAGGGTGGCGGTTCTGAGGGTGGCGGTACTAAACCTCCTGAGTACGGTGATACACCTATTCC |
| | GGGCTATACTTATATCAACCCTCTCGACGGCACTTATCCGCCTGGTACTGAGCAAAACCCCGCTAATCCTAAT |
| | CCTTCTCTTGAGGAGTCTCAGCCTCTTAATACTTTCATGTTTCAGAATAATAGGTTCCGAAATAGGCAGGGGG |
| | CATTAACTGTTTATACGGGCACTGTTACTCAAGGCACTGACCCCGTTAAAACTTATTACCAGTACACTCCTGT |
| | ATCATCAAAAGCCATGTATGACGCTTACTGGAACGGTAAATTCAGAGACTGCGCTTTCCATTCTGGCTTTAAT |
| | GAGGATTTATTTGTTTGTGAATATCAAGGCCAATCGTCTGACCTGCCTCAACCTCCTGTCAATGCTGGCGGCG |
| | GCTCTGGTGGTGGTTCTGGTGGCGGCTCTGAGGGTGGTGGCTCTGAGGGTGGCGGTTCTGAGGGTGGCGGCTC |
| | TGAGGGAGGCGGTTCCGGTGGTGGCTCTGGTTCCGGTGATTTTGATTATGAAAAGATGGCAAACGCTAATAAG |
| | GGGGCTATGACCGAAAATGCCGATGAAAACGCGCTACAGTCTGACGCTAAAGGCAAACTTGATTCTGTCGCTA |
| | CTGATTACGGTGCTGCTATCGATGGTTTCATTGGTGACGTTTCCGGCCTTGCTAATGGTAATGGTGCTACTGG |
| | TGATTTTGCTGGCTCTAATTCCCAAATGGCTCAAGTCGGTGACGGTGATAATTCACCTTTAATGAATAATTTC |
| | CGTCAATATTTACCTTCCCTCCCTCAATCGGTTGAATGTCGCCCTTTTGTCTTTGGCGCTGGTAAACCATATG |
| | AATTTTCTATTGATTGTGACAAAATAAACTTATTCCGTGGTGTCTTTGCGTTTCTTTTATATGTTGCCACCTT |
| | TATGTATGTATTTTCTACGTTTGCTAACATACTGCGTAATAAGGAGTCTTAATCATGCCAGTTCTTTTGGGTA |
| | TTCCGTTATTATTGCGTTTCCTCGGTTTCCTTCTGGTAACTTTGTTCGGCTATCTGCTTACTTTTCTTAAAAA |
| | GGGCTTCGGTAAGATAGCTATTGCTATTTCATTGTTTCTTGCTCTTATTATTGGGCTTAACTCAATTCTTGTG |
| | GGTTATCTCTCTGATATTAGCGCTCAATTACCCTCTGACTTTGTTCAGGGTGTTCAGTTAATTCTCCCGTCTA |
| | ATGCGCTTCCCTGTTTTTATGTTATTCTCTCTGTAAAGGCTGCTATTTTCATTTTTGACGTTAAACAAAAAAT |
| | CGTTTCTTATTTGGATTGGGATAAATAATATGGCTGTTTATTTTGTAACTGGCAAATTAGGCTCTGGAAAGAC |
| | GCTCGTTAGCGTTGGTAAGATTCAGGATAAAATTGTAGCTGGGTGCAAAATAGCAACTAATCTTGATTTAAGG |
| | CTTCAAAACCTCCCGCAAGTCGGGAGGTTCGCTAAAACGCCTCGCGTTCTTAGAATACCGGATAAGCCTTCTA |
| | TATCTGATTTGCTTGCTATTGGGCGCGGTAATGATTCCTACGATGAAAATAAAAACGGCTTGCTTGTTCTCGA |
| | TGAGTGCGGTACTTGGTTTAATACCCGTTCTTGGAATGATAAGGAAAGACAGCCGATTATTGATTGGTTTCTA |
| | CATGCTCGTAAATTAGGATGGGATATTATTTTTCTTGTTCAGGACTTATCTATTGTTGATAAACAGGCGCGTT |
| | CTGCATTAGCTGAACATGTTGTTTATTGTCGTCGTCTGGACAGAATTACTTTACCTTTTGTCGGTACTTTATA |
| | TTCTCTTATTACTGGCTCGAAAATGCCTCTGCCTAAATTACATGTTGGCGTTGTTAAATATGGCGATTCTCAA |
| | TTAAGCCCTACTGTTGAGCGTTGGCTTTATACTGGTAAGAATTTGTATAACGCATATGATACTAAACAGGCTT |
| | TTTCTAGTAATTATGATTCCGGTGTTTATTCTTATTTAACGCCTTATTTATCACACGGTCGGTATTTCAAACC |
| | ATTAAATTTAGGTCAGAAGATGAAATTAACTAAAATATATTTGAAAAAGTTTTCTCGCGTTCTTTGTCTTGCG |
| | ATTGGATTTGCATCAGCATTTACATATAGTTATATAACCCAACCTAAGCCGGAGGTTAAAAAGGTAGTCTCTC |
| | AGACCTATGATTTTGATAAATTCACTATTGACTCTTCTCAGCGTCTTAATCTAAGCTATCGCTATGTTTTCAA |
| | GGATTCTAAGGGAAAATTAATTAATAGCGACGATTTACAGAAGCAAGGTTATTCACTCACATATATTGATTTA |
| | TGTACTGTTTCCATTAAAAAAGGTAATTCAAATGAAATTGTTAAATGTAATTAATTTTGTTTTCTTGATGTTT |
| | GTTTCATCATCTTCTTTTGCTCAGGTAATTGAAATGAATAATTCGCCTCTGCGCGATTTTGTAACTTGGTATT |
| | CAAAGCAATCAGGCGAATCCGTTATTGTTTCTCCCGATGTAAAAGGTACTGTTACTGTATATTCATCTGACGT |
| | TAAACCTGAAAATCTACGCAATTTCTTTATTTCTGTTTTACGTGCAAATAATTTTGATATGGTAGGTTCTAAC |
| | CCTTCCATTATTCAGAAGTATAATCCAAACAATCAGGATTATATTGATGAATTGCCATCATCTGATAATCAGG |
| | AATATGATGATAATTCCGCTCCTTCTGGTGGTTTCTTTGTTCCGCAAAATGATAATGTTACTCAAACTTTTAA |
| | AATTAATAACGTTCGGGCAAAGGATTTAATACGAGTTGTCGAATTGTTTGTAAAGTCTAATACTTCTAAATCC |
| | TCAAATGTATTATCTATTGACGGCTCTAATCTATTAGTTGTTAGTGCTCCTAAAGATATTTTAGATAACCTTC |
| | CTCAATTCCTTTCAACTGTTGATTTGCCAACTGACCAGATATTGATTGAGGGTTTGATATTTGAGGTTCAGCA |
| | AGGTGATGCTTTAGATTTTTCATTTGCTGCTGGCTCTCAGCGTGGCACTGTTGCAGGCGGTGTTAATACTGAC |
| | CGCCTCACCTCTGTTTTATCTTCTGCTGGTGGTTCGTTCGGTATTTTTAATGGCGATGTTTTAGGGCTATCAG |
| | TTCGCGCATTAAAGACTAATAGCCATTCAAAAATATTGTCTGTGCCACGTATTCTTACGCTTTCAGGTCAGAA |
| | GGGTTCTATCTCTGTTGGCCAGAATGTCCCTTTTATTACTGGTCGTGTGACTGGTGAATCTGCCAATGTAAAT |
| | AATCCATTTCAGACGATTGAGCGTCAAAATGTAGGTATTTCCATGAGCGTTTTTCCTGTTGCAATGGCTGGCG |
| | GTAATATTGTTCTGGATATTACCAGCAAGGCCGATAGTTTGAGTTCTTCTACTCAGGCAAGTGATGTTATTAC |
| | TAATCAAAGAAGTATTGCTACAACGGTTAATTTGCGTGATGGACAGACTCTTTTACTCGGTGGCCTCACTGAT |
| | TATAAAAACACTTCTCAGGATTCTGGCGTACCGTTCCTGTCTAAAATCCCTTTAATCGGCCTCCTGTTTAGCT |
| | CCCGCTCTGATTCTAACGAGGAAAGCACGTTATACGTGCTCGTCAAAGCAACCATAGTACGCGCCCTGTAGCG |
| | GCGCATTAAGCGCGGCGGGTGTGGTGGTTACGCGCAGCGTGACCGCTACACTTGCCAGCGCCCTAGCGCCCGC |
| | TCCTTTCGCTTTCTTCCCTTCCTTTCTCGCCACGTTCGCCGGCTTTCCCCGTCAAGCTCTAAATCGGGGGCTC |
| | CCTTTAGGGTTCCGATTTAGTGCTTTACGGCACCTCGACCCCAAAAAACTTGATTTGGGTGATGGTTCACGTA |
| | GTGGGCCATCGCCCTGATAGACGGTTTTTCGCCCTTTGACGTTGGAGTCCACGTTCTTTAATAGTGGACTCTT |
| | GTTCCAAACTGGAACAACACTCAACCCTATCTCGGGCTATTCTTTTGATTTATAAGGGATTTTGCCGATTTCG |
| | GAACCACCATCAAACAGGATTTTCGCCTGCTGGGGCAAACCAGCGTGGACCGCTTGCTGCAACTCTCTCAGGG |
| | CCAGGCGGTGAAGGGCAATCAGCTGTTGCCCGTCTCACTGGTGAAAAGAAAAACCACCCTGGCGCCCAATACG |
| | CAAACCGCCTCTCCCCGCGCGTTGGCCGATTCATTAATGCAGCTGGCACGACAGGTTTCCCGACTGGAAAGCG |
| | GGCAGTGAGCGCAACGCAATTAATGTGAGTTAGCTCACTCATTAGGCACCCCAGGCTTTACACTTTATGCTTC |
| | CGGCTCGTATGTTGTGTGGAATTGTGAGCGGATAACAATTTCACACAGGAAACAGCTATGACCATGATTACGA |
| | ATTCGAGCTCGGTACCCGGGGATCCTCAACTGTGAGGAGGCTCACGGACGCGAAGAACAGGCACGCGTGCTGG |
| | CAGAAACCCCCGGTATGACCGTGAAAACGGCCCGCCGCATTCTGGCCGCAGCACCACAGAGTGCACAGGCGCG |
| | CAGTGACACTGCGCTGGATCGTCTGATGCAGGGGGCACCGGCACCGCTGGCTGCAGGTAACCCGGCATCTGAT |
| | GCCGTTAACGATTTGCTGAACACACCAGTGTAAGGGATGTTTATGACGAGCAAAGAAACCTTTACCCATTACC |
| | AGCCGCAGGGCAACAGTGACCCGGCTCATACCGCAACCGCGCCCGGCGGATTGAGTGCGAAAGCGCCTGCAAT |
| | GACCCCGCTGATGCTGGACACCTCCAGCCGTAAGCTGGTTGCGTGGGATGGCACCACCGACGGTGCTGCCGTT |
| | GGCATTCTTGCGGTTGCTGCTGACCAGACCAGCACCACGCTGACGTTCTACAAGTCCGGCACGTTCCGTTATG |
| | AGGATGTGCTCTGGCCGGAGGCTGCCAGCGACGAGACGAAAAAACGGACCGCGTTTGCCGGAACGGCAATCAG |
| | CATCGTTTAACTTTACCCTTCATCACTAAAGGCCGCCTGTGCGGCTTTTTTTACGGGATTTTTTTATGTCGAT |
| | GTACACAACCGCCCAACTGCTGGCGGCAAATGAGCAGAAATTTAAGTTTGATCCGCTGTTTCTGCGTCTCTTT |
| | TTCCGTGAGAGCTATCCCTTCACCACGGAGAAAGTCTATCTCTCACAAATTCCGGGACTGGTAAACATGGCGC |
| | TGTACGTTTCGCCGATTGTTTCCGGTGAGGTTATCCGTTCCCGTGGCGGCTCCACCTCTGAAAGCTTGGCACT |
| | GGCCGTCGTTTTACAACGTCGTGACTGGGAAAACCCTGGCGTTACCCAACTTAATCGCCTTGCAGCACATCCC |
| | CCTTTCGCCAGCTGGCGTAATAGCGAAGAGGCCCGCACCGATCGCCCTTCCCAACAGTTGCGCAGCCTGAATG |
| | GCGAATGGCGCTTTGCCTGGTTTCCGGCACCAGAAGCGGTGCCGGAAAGCTGGCTGGAGTGCGATCTTCCTGA |
| | GGCCGATACTGTCGTCGTCCCCTCAAACTGGCAGATGCACGGTTACGATGCGCCCATCTACACCAACGTGACC |
| | TATCCCATTACGGTCAATCCGCCGTTTGTTCCCACGGAGAATCCGACGGGTTGTTACTCGCTCACATTTAATG |
| | TTGATGAAAGCTGGCTACAGGAAGGCCAGACGCGAATTATTTTTGATGGCGTTCCTATTGGTTAAAAAATGAG |
| | CTGATTTAACAAAAATTTAATGCGAATTTTAACAAAATATTAACGTTTACAATTTAAATATTTGCTTATACAA |
| | TCTTCCTGTTTTTGGGGCTTTTCTGATTATCAACCGGGGTACATATGATTGACATGCTAGTTTTACGATTACC |
| | GTTCATCGATTCTCTTGTTTGCTCCAGACTCTCA |

TABLE 2
Staple sequences used for the octahedron triangle (T_octa) folding

| SEQ ID | |
|---|---|
| NO: | |
| | Core structure oligo sequences (5′-3′) |
| 2 | CACGTTGAGGAATTGCGAATAATCAGATGATGAATATAC |
| 3 | AGGGAAGAAAGCGAAAGGAGCGGGCTGCGGCTCGTTAGATAAAGGGA |
| 4 | CGGGGAAAGCCGGCGAACGTGGCGGAGCTCGATTGCTTTG |
| 5 | CAGGCGCAGACGGTCAAACGTAACTGGCAGCCTCCGGCCA |
| 6 | CCCTAAAGGGAGCCCCCGATTTATTCCTGTGTGAAATT |
| 7 | AATTTCAACTTTAATCTTAATAAATTTTTCGAACTA |
| 8 | GGTTTTGAAGCCTTAAAACGCTAATTTTTGAGCGTC |
| 9 | ATGGAAACAGTACATATTAGATTAGGTGCTGGTAATTTTC |
| 10 | TAGAAAATACATACATAAAGGTGGGTATTCTAGAAGGTAA |
| 11 | ATAGCCGAACAAAATAGCTATCTTACCGAAGAATGGAAACAAATATTGATATA |
| 12 | CCAACAGGTCAGGATTAGAGAGTGTACAGACTCATTCCAAGTAGATT |
| 13 | TCTATCAGGGCGTAATGAGTGTTGCAGCCCTTCACCCATTTTGAAAAACGCT |
| 14 | ATGGCCCAAACGTGGACTCCAACGCAGCACAGACAATATT |
| 15 | GACTCCTTATTACGCAGTATGTTCTCCCGACTTGCGGG |
| 16 | CGAAAGACTTCAAATATCGCGTTGGGCTTGAGATGGTT |
| 17 | GAATAAGTTTATTCGAGAATGACCATAAATCAAAAATCAG |
| 18 | AGAAACAATAAAATTAATTTTTCGTTGTAGCAGCCTGAGTAGAAGAACTC |
| 19 | GCGATTATAAATGGTCAATACCGCCAGCCAGTATCGGCC |
| 20 | CGGAGATTTGTATTACACGAAAGAGGCAAAAGACCTCCGGCTTAGGT |
| 21 | AAAGACTTTTTCATGAGGAAGAAAATACCACAAAAATAGCGAGAGGCT |
| 22 | CCGACAATGAGCGACATTTTTAATCAAGTTTATCGGCATTTTCGGTCAT |
| 23 | ACTGCCCGCTTTCCAGAGCAGTTGGGAAAAAGAGACG |
| 24 | CATTCCAAGAACGCAACCATCCTAATTTACGAAAAGCCTGTTTAGTA |
| 25 | AGAACGCGCCTGTTTATATCCTGACCCAATCCATTAACTGAACACCCT |
| 26 | AGGCGCATAGATAAGGCTTGCCAGCAAACTAGCTTAAT |
| 27 | CGGTCGTTCGTGTGATAAATAAGGCGTTAAATAAGAATAAAGCCCACGCATAACCGTGA |
| 28 | TTTGATTAGTGCCAAGCGAAACGTACAGCTTGAGAAGAGTCAATAGTG |
| 29 | TGCCAACGTTTTTCAGCACCGATCAAACTTAAATTTAATCGGCC |
| 30 | TCAGCGTAGACGCTGAAAACATAGCGATAGCAAT |
| 31 | AATTTATCTTTAGTGAGTCACCTGTTTAGCTCACGACGTGGTGGAGC |
| 32 | AAGGCACCTTTTTACCTAAAAGAGGCTTTGAGGACTACGGAACA |
| 33 | AGCTTCAAAGCGAACCAGACCGGACTGACGAGAATATGCA |
| 34 | CGCCACGGGAACAATTCTTTTTACTAATAGTACAAGGCAAAGAATTAGCA |
| 35 | CAAGAAAATTTTTTAATATCCATGTTCAGCTAATGCTTTCCAGA |
| 36 | TTACCTGAGCAGAGGCGAATTATTCAG |
| 37 | CTGCTCATTTGCCGCCTCGGGAAAGTTTTTCTAAAATCCTGTTTGATG |
| 38 | TCGTCGTATGTTTTTTAGTGTGTCCATCACGCACGGACCGAGTA |
| 39 | AAAATCCCGACTTTCTCCTTAGAAATCACTTATACTTC |
| 40 | AACTTTAATCCTTTTTATCGGAAAAGGTGGCATCGGATTTGGGG |
| 41 | TTAATTTCATACAGGGTAGCATTAACATCCAAACAGCTATATATT |
| 42 | ATCCTGAGGCTTGCAGGGAGCCGGAAACGTCGCTTGCTTATAGTTGCG |
| 43 | CAACATGTCGTTTTCGCCTTTAGCGTCAGAAGTAACAGCAAGTTAC |
| 44 | TGTAAATGGTTTGAAATACCGACCTGACCTAAATTTAATGCTG |
| 45 | CAGAGGCATTTTTTTTATAATCAAGGTTTAAACATCGGG |
| 46 | GCTCTCACGGCGGTTGGCAGCAACCGCAAGAACTTTTTTA |
| 47 | AAGGGATAGGCAACAGTTGCGCTCTAAAGCCTGGGGTGCC |
| 48 | CCGTGGTGCAACAGGACGCTCAATAGTTGGCATCTAAA |
| 49 | GTGTTCAGCAAATGCGGTCGGTGGTGCCATCCATTTCATTTGAATTA |
| 50 | GGCCATCGCCTGATAACAAGACAAAGAATTTTTGCGAGAA |
| 51 | GCAACATCAGTTGACATTATTGAACGAGTAGTAAATTTTAATTCGGGGGTAAT |
| 52 | CAGCGAAAACATAACGCCAAAAGGTAACCCTCCACCATCAAATGCCGG |
| 53 | AAAGGTATTAAACCAACAACAGTAGGGCTTTTTTAATTGAGAATCGAGCCA |
| 54 | ACAATAACAGCCAGCCTAATTAGGCGTTTTAGCGAACAGCAAACGCGCTAATA |
| 55 | AAAGGTAATTTGTTTAACGTCAAACATAAAAATATTCACA |
| 56 | ACACGTTAACGGCATCAATAACCTTGCTTTTTTCTGTAAA |
| 57 | CAGAAGTATTGGGAACGCGCGTCATGGTCATAGCTGTGAGCTTGACTTATAAA |
| 58 | TTTCACCATTTACATTGGTTTTTAGATTCACCCGGTTTGC |
| 59 | CTGATTGCAAGCGGTCTAAGAATACGTGGAAAGGAAGGTT |
| 60 | GCGAACGTATAACAAAGATTGTTCATATGTACCCCGGTTGATAAT |
| 61 | GCTCCATGAAATGCAACATAAAGCTTTTTTAATCGGTTGTACCAAAAA |
| 62 | AGATTTTTTTAGGAAATCTACGATTGTGAATTACCTTAAGAAGCAA |
| 63 | AGCGGTGCAGTCACACTCCAGAACATTTTTTATTACCGCCAGCCATTG |
| 64 | TTTGCCATCAACATGTTTTAAAACACCAACAGGTAGTTACTTAG |
| 65 | GCAAGCCGCAGAACCACTTTTCATATTTTTTCAAAATCACCGGAACCA |
| 66 | GGTAATTCGATTGAGGGAGGAGAACGCGTGCCAGTTTTTTTATT |
| 67 | CGTTCCGGGACCCCCAAAAATCATACCGGAAACAATCGGCTT |
| 68 | AGGCTCCAAAAGGACCATCAAGAGAAGGATACCGCCAC |
| 69 | TTATCCGCTCACAATTGCCAGCTGTTTTTATTAATG |
| 70 | ATAATACATTTGAGGAAGCAGCAATATTAATTTTTTAGACAGGAATAC |
| 71 | GTCACCGAAAATTGTCACAATCAATAGAAAATGCCCGTAAACCTATT |
| 72 | TATCACCTATTTCGGTAAACAGTTAATGCCTTCTAGCT |
| 73 | AGGTGAATAATTAGAGCATAGTTAGACGTTAGTAAATTTTA |
| 74 | ATATCTTTAGGAGCACTTCTGACCATGGATTAGTGAGACG |
| 75 | GGCAAAAGCGCGTACTATGGATTCGTAAGGGAGAGGCGGTGCCC |
| 76 | GAGTGTTGGGGGTCGAGGTGCCGTAAAGCACTAAATCGGA |
| 77 | TTCCAGTTTGGAACAATCTTTAATTAGAACCCTAACAACTTTTTAATAGA |
| 78 | TATTAAAGCTACGTGAACCATCACCCAAATCACCGGAAGCAGCAGGCG |
| 79 | CGCCTTTTTGGGTGCCTGTCGTCCACACAACATACGAGAGTTTTTT |
| 80 | CGACCTTTTGATAAGAGGTCATTCATGTCAAATAAGCAA |
| 81 | TGCTGAATAGAGAATCTGCCTGAGGAGTAACATGTTAA |
| 82 | AGTAAAATGTTTTTTTTGACTGGATAGCGTTTTGCTTTTTAAAGAAGT |
| 83 | CCAATACTAGCGGATTGCATCAAAAAGATTAAGAGGAAGC |
| 84 | GCGGAATCGTCATAAATGAGAGATGAGAAAGGCATTAAATTTTTGTGAGC |
| 85 | GAATCCCCGTCTTTACCCTGACTATTATAGTCTGCGATTTTAAAAACC |
| 86 | CTCAAATGCTTTAAACGATAAATTATATGATAGTCTGGCC |
| 87 | AGTTCAGAAAGAGCAACACTATCAAATTACGAAAGCCTTTCCCTGTAA |
| 88 | TTTTGCGGAGCCAGTAAAACAGGAGGCCGATATCAGAG |
| 89 | AACAAAGATTGAGTAACAACTCGTTATTAGACTTTACAAACGAGAGGG |
| 90 | GACAAAAGAGTTTTAACCACCAGAGGTTTAGTTAGGAT |
| 91 | TCAGAGAGATAATTTTTCCACAAGAATTGAGAACATTTTTAGTCAGAG |
| 92 | GTTAAGCCTAACGGAATACCCAAAAGAACTGGCATGATTA |
| 93 | CAATAATAAGAGCAAGTCCAGTAAGGCAGGTCCACCGTATTTTTTCAGGA |
| 94 | AATTAAGCAATAGGGTTTTCCCAGTATATTTTCATAACCTCAGGTCTG |
| 95 | AGCCCTTTTTTACAGAGAGAATAAAATGAAAACCGCCACCACCGGAAC |
| 96 | TTAGGCAAGTGTAGCGGTCACGCGGCGGTCATGAGAGCC |
| 97 | TCAAAAGAATAGTTTTTCCGAGATAGGGTTGTGGTTTTTTCCGAAATC |
| 98 | TTTGAATGGCTATTAGGAGTCCACTTTGCCCCATAAAGTG |
| 99 | ATTGCCTGAGAGTCTGGAGCAAACAATAATGCTGTAGCGAG |
| 100 | TGTTGGGAAGGGCGTTTTTTCGGTGCAGGGGGATGTGCTG |
| 101 | ATGATACAGGAGTGTACTGGTAATAGGCGACATTCAACGAG |
| 102 | AAGCGCAGTCTCTGAATTTACCGTAAACAATGCGCATTAGACGGGAGA |
| 103 | CGAACCACGACCAGTATTAGAGCCAACCCT |
| 104 | AAACATCGCCATTAAAAATACCGAAGCGCCGCTACAGGTCC |
| 105 | CGTTAATAGATGAACGGTAATCGTAAAACTAGTTTGCGGATGGAAGTT |
| 106 | TAATGTGTAGGTAAAGATTTTTTCAAAAGGGTCTACAAAGGCTATCAGGT |
| 107 | AAGGCGATTAAGTTCAGCGCATTAAATTTTACCCGTCG |
| 108 | TTCAACCGGCGGGAGGGCATAGTCTTTTGCGGGATCGTC |
| 109 | GTATTAAGCGGGGTCAGTGCCTTGAGTAACAG |
| 110 | GCCGCCGCCAGCATTGATTTTTAGGAGGTTGAGCGTCATACATGGCTTTT |
| 111 | AGACGATTTCAGAGCCAACGATTTAGTAATTCTGTCCAGACGACG |
| 112 | AATCCTCACTCAGAGTAGCAGCCATAAGAGAATATAAAG |
| 113 | TGCCACGCGTATTAACACCGCCTTTAAAGCC |
| 114 | TCTAAAGCCAGCAGAAGATAAAACAGAGGTGATGCGCGTATGCTTTCC |
| 115 | ATAAAAGGGACATTCTGTTTTTCCAACAGAGAGCGCGAACTGATAGCCCT |
| 116 | ATACCTAGCCTGGCCGAGAGATAGTAAAAAAAAAAGAACG |
| 117 | GACGACAGCTTTCCGGCACCGTAACGCCAAAGGAAAGATACA |
| 118 | ATTTCAACACCAATATTCCTGTAGCCAGCTTTCATCAA |
| 119 | GCGTAACGACAAACTACGCCACCCTCAGAGCCTAATTCGC |
| 120 | TTAAAAGTAACCACCAGAAGGAAAGAAATTGCGGTCGGTACGCCAGAA |
| 121 | ATCGCACTGAATTTGTCCAATTCTACTGACCAACTTTCTAACTCACAT |
| 122 | CCTCAGAGTTTTGTTAAAATTTTTATTGTAAAACGGTGTCTGGCTTAG |
| 123 | TTTTGTCGAAAGGCCGCTTGAGCCATTTGGG |
| 124 | ATTGGCGCTCCAGTAGCACCATTACCATTAGCAAGGTTTCTTTCCA |
| 125 | TTTGCCATAGGCTGAGACTCCCAGACATGAAAGGAAATTA |
| 126 | TCAGCTCATTTTTTAGCAAGGATAGTCAAATGTTTACCA |
| 127 | GGAACGCCATCAAAAATACGCCAGTACTTTTAATAAATC |
| 128 | TGGTAATAATCACCTTGCTGACGTATGAAAAAGTATAACGACCACCAC |
| 129 | AGCGGGGTTTTGCTCCGCCACCCGGCCTTGACAGGGAAG |
| 130 | GCCCCCTTATTATATCGGTTTATCAACCAATGACAACCATCCACCGGA |
| 131 | AACTATCGGCCTTGCGTAGATTTTCGTGAGGCCATTCGCCTAACAAAA |
| 132 | AGTACCAAGTATAGCCCGGAATAGGTGTAT |
| 133 | AGAATAGAAAGGAATTTTTAACTAAAAAATCTCCAAAAAA |
| 134 | AATCCTGATTGTTTTTTTTGATTATAATATCAAAATTATT |
| 135 | AACCTACCCTTCTGAATAATGGACATTCGCCGACGGCCA |
| 136 | GCACGTAAAACAGAGAAACCTCAAATATCAGTCAATAG |
| 137 | AATCAATATCTGGTCCGTCTGAATGAAAGCGCACGCTGG |
| 138 | AAATCAACAGTTGAAAAGGGTTAGCATGGAAGTAATAAC |
| 139 | ATAGGTCATCAGGAAGAAACAGGGTTGATTC |
| 140 | CGTTGGTGGATTGACCGTAATGGGGGAATTGAAGCCCCAA |
| 141 | CCTCAGAACCGCCACCATTCTGAAACAGCCCTCCAGCA |
| 142 | CTCAGAACCAACGCCTGTAGCATTGCCGAATTTTCTGTATGCGGAGTG |
| 143 | CCCAATAGGAACCCATGTAGCTAAACAACCACCCTATCTAAAGCCCTGCC |
| 144 | TTTCGTCACCAGTCATTTTCAGGGATAGCAAG |
| 145 | GGCGGATAAGTGCCGTAATTTTTTCGCCTCCCTGTAGCG |
| 146 | GATTCTCCGTGGGAACATATTTAAGAGGGGACTAGTTTGACCATTATC |
| 147 | AAACGGCGTAGACCGTGCATCTGCGGGCTTCTGGTGCCGGTGCGCAAC |
| 148 | CAATTCGACATTATCAGCAACAGCGGGAGCT |
| 149 | TTTAGAAGATTAAATCCTTTGCCCAATAGCGGAATTATCAATCAATAT |
| 150 | TATTTTTTTTTTATATCTTACCATCAAGATTAGTTGCTCGCAATAA |
| 151 | AAAACACTGCGAAACAAAGTACAACCGGAACGCGCGACCTACTAAAGT |
| 152 | AAATAAGAACCACCCTCATTTTTAGCCGCCACACAAAATA |
| 153 | TTCAACTATTAGAACCCTTTTTTATATATTTTAAAGATTC |
| 154 | AAATCACATCTAGGAATCTAGAAGGCTTATCCGCAACATATGCGCCAAA |
| 155 | CTGGCGAAGGGCCTCTTCGCTATACTTTCAAAATTTCTT |
| 156 | TCAAAGGGCTGAGAGAGAGGAAAGAGGACAGATTGACAAG |
| 157 | TTTCGCACCAAGCCATCTTTCAAACGCGGTCCGTTTTTTAAAT |
| 158 | TAATGGACTTGTGTTAAACGATGCTGATTGCGAGCACATAGGCGGCCGGAACCGA |
| 159 | TGGTCGTCTCGTCGCAAAGCTGCTCAATTT |
| 160 | TCTCTTCAGTGAGCTGGCTGACCTTCATCAACCCAAATCATCATAAG |
| 161 | TATAAACCGGATATTCATTAGAGTAATCTGAACGGTACCTTTAATTGCTAAAACCG |
| 162 | TCCGCCATGTTTACCATGAAGGGTAGCCGCACCCTCATAACGGAACGTGCCAATT |
| 163 | CGCTACCGTAATCAGTACAAAACCATCGAAACCAATCT |
| 164 | TTCATATGTTCATTAAATCAGATAATTACCGCGCCCAT |
| 165 | TATACGTAATGCCACTACGGGGTTATATAACTATA |
| 166 | TCGGCTGTCTTTCCTTATTTCATCGGAGAACAAATATTGAC |
| 167 | CCGGAGACAAAAATTTATGCAGATGACAGCATCCATTAAACGT |
| 168 | TATACCAGTCAGGACGTTGGGAAGTTTCGGAACGAGGGTA |
| 169 | AGAGGGTAGCTATTTTTATTCATTGACGACGATAAGAACTGGT |
| 170 | GTTTACCAAAAAGAAACGCAAAGACACCACGGCAAGCAA |
| 171 | TTTTTTAAGTCCTGAACATATGCGTTATACAAATTCTTACCATTTCAA |
| 172 | AATTTAGGAAAATCGCGCAAAAGAAGATGATGAAACAAACGCTGGTAATGGTTTTT |
| 173 | TTTTTCACTCTGTGGTGCGCTAGGGCGCTAGAAAAGTAAGCAG |
| 174 | TTTTTGTAAAGGTTTCGCGCGCCTGTGTTTTT |
| 175 | TTTTTAGCTACAATTTTCAACAATAGATTTTT |
| 176 | AAATAGCAGTTACCAGAAGGAAACCGAGGAAAATTTTGCACCCTTTTT |
| | H1 design oligo sequences (5′-3′) |
| 177 | GCAGTAGAGTAGGTAGAGATTAGGCACAATACTATTAATTCTGGTCATGTACATCGACATAAATAATTGCG |
| 178 | GCAGTAGAGTAGGTAGAGATTAGGCATCAGATGTAAAACATTCAGGCAAACCAGGCAAAGCGC |
| 179 | GCAGTAGAGTAGGTAGAGATTAGGCAAGAGACTACCTTTTTAAATACACTCGCGAGCTATTGTGTC |
| 180 | GCAGTAGAGTAGGTAGAGATTAGGCAATGCATTCAAATATATTTTAGACCCTCAGCATTATGA |
| 181 | GCAGTAGAGTAGGTAGAGATTAGGCATACCGTCGAGGTGCAGTTTCAGGGATTTTCCGTAACACTGAG |
| 182 | GCAGTAGAGTAGGTAGAGATTAGGCAATCATAATTACTAGAAGCATGTAGATAGCAGCGTACCGCATATAA |
| 183 | GCAGTAGAGTAGGTAGAGATTAGGCACCATATTTAACAACGCTACCGACAGAGCCACCCTCAGAAC |
| 184 | GCAGTAGAGTAGGTAGAGATTAGGCACTTTTCGTCAGATGGCAATTCTCATATTCCTGATTAT |
| 185 | GCAGTAGAGTAGGTAGAGATTAGGCATTAATTACATTTAACACACGCAACAAAGAGTCAGATGCCG |
| | H2 design oligo sequences (5′-3′) |
| 186 | GCAGTAGAGTAGGTAGAGATTAGGCATTTTTTCAATACTATTAATTCTGGTCATGTACATCGACATAAATA |
| | ATTGCG |
| 187 | GCAGTAGAGTAGGTAGAGATTAGGCATTTTTTTTCAGATGTAAAACATTCAGGCAAACCAGGCAAAGCGC |
| 188 | GCAGTAGAGTAGGTAGAGATTAGGCATTTTTTTTTTTTTAGAGACTACCTTTTTAAATACACTCGCGAGCT |
| | ATTGTGTC |
| 189 | GCAGTAGAGTAGGTAGAGATTAGGCATTTTTTTTATGCATTCAAATATATTTTAGACCCTCAGCATTATGA |
| 190 | GCAGTAGAGTAGGTAGAGATTAGGCATTTTTTTTACCGTCGAGGTGCAGTTTCAGGGATTTTCCGTAACAC |
| | TGAG |
| 191 | GCAGTAGAGTAGGTAGAGATTAGGCATTTTTTTTATCATAATTACTAGAAGCATGTAGATAGCAGCGTACC |
| | GCA |
| 192 | GCAGTAGAGTAGGTAGAGATTAGGCATTTTTTTTTTATAACCATATTTAACAACGCTACCGACAGAGCCAC |
| | CCTCAGAAC |
| 193 | GCAGTAGAGTAGGTAGAGATTAGGCATTTTTTTTTCTTTTCGTCAGATGGCAATTCTCATATTCCTGATTA |
| | T |
| 194 | GCAGTAGAGTAGGTAGAGATTAGGCATTTTTTTTTTTTAATTACATTTAACACACGCAACAAAGAGTCAGA |
| | TGCCG |
| | H3 design oligo sequences (5′-3′) |
| 195 | GCAGTAGAGTAGGTAGAGATTAGGCATTGCAGTAGAGTAGGTAGAGATTAGGCACAATACTATTAATTCTG |
| | GTCATGTACATCGACATAAATAATTGCG |
| 196 | GCAGTAGAGTAGGTAGAGATTAGGCATTGCAGTAGAGTAGGTAGAGATTAGGCATCAGATGTAAAACATTC |
| | AGGCAAACCAGGCAAAGCGC |
| 197 | GCAGTAGAGTAGGTAGAGATTAGGCATTGCAGTAGAGTAGGTAGAGATTAGGCAAGAGACTACCTTTTTAA |
| | ATACACTCGCGAGCTATTGTGTC |
| 198 | GCAGTAGAGTAGGTAGAGATTAGGCATTGCAGTAGAGTAGGTAGAGATTAGGCAATGCATTCAAATATATT |
| | TTAGACCCTCAGCATTATGA |
| 199 | GCAGTAGAGTAGGTAGAGATTAGGCATTGCAGTAGAGTAGGTAGAGATTAGGCATACCGTCGAGGTGCAGT |
| | TTCAGGGATTTTCCGTAACACTGAG |
| 200 | GCAGTAGAGTAGGTAGAGATTAGGCATTGCAGTAGAGTAGGTAGAGATTAGGCAATCATAATTACTAGAAG |
| | CATGTAGATAGCAGCGTACCGCA |
| 201 | GCAGTAGAGTAGGTAGAGATTAGGCATTGCAGTAGAGTAGGTAGAGATTAGGCATATAACCATATTTAACA |
| | ACGCTACCGACAGAGCCACCCTCAGAAC |
| 202 | GCAGTAGAGTAGGTAGAGATTAGGCATTGCAGTAGAGTAGGTAGAGATTAGGCACTTTTCGTCAGATGGCA |
| | ATTCTCATATTCCTGATTAT |
| 203 | GCAGTAGAGTAGGTAGAGATTAGGCATTGCAGTAGAGTAGGTAGAGATTAGGCATTAATTACATTTAACAC |
| | ACGCAACAAAGAGTCAGATGCCG |

TABLE 3
Staple sequences used for the T1 pentamer triangle folding

| SEQ | |
|---|---|
| ID | |
| NO: | |
| | Core structure oligo sequences (5′-3′) |
| 204 | TGCGGCGGCCGGGTCAGTCCAGCATCAGCTCGATAACGGA |
| 205 | TGCAGCAAGCCTGGGGTGCCTAATGAGTGAGCTTTTTAACTCACATTAATTG |
| 206 | ATTTCATTTGAATTACCTTTTTTAAGAAGATGATTCATTT |
| 207 | GGAGGTCAATAACCTTTTTTTTTATAGTAGTAGTTTTTATTAATAGAT |
| 208 | CTCACAGTGTTTCTGCACAACTAAAGGATTTA |
| 209 | AAAAGAATTAAGTACTATGCCGTACTGGTAATAAGTTTTAACTTGCGTA |
| 210 | TACCTACATTTTGAAAGGGACGAATGGCTCGCTTAGGAGCACTACAGCACG |
| 211 | AAATAGTTTGACCATCATCCAATAA |
| 212 | GTTAGAACTCAAACTACCTGAAAGC |
| 213 | TATGACCCTGTAATACTTTATAAAGCCTCAGA |
| 214 | GCGCGAACTGATAGAAGATAATGCTGAACCTCAATTTTAAA |
| 215 | ACCACCAGAGCCGTTGATATTTGATACAGGAGTGAGTAAA |
| 216 | GCATAAAGCTAAAAGAAGCCTGTGAGAAAGGCCGATTGA |
| 217 | CGGAACAAAGAAACCAAGCCCGGATCAAGTTTCCGGTTTTGCTCAGT |
| 218 | CATTTTGTATCATCATATGGGTCGAGGTTTTTTCCGTTCATTTGC |
| 219 | AATATTTGCATTAAATTGTTTAGACTGTTTTTATAGGCATCGTA |
| 220 | GTGTACAGACCAGGCGCATAGGCTATGCCACTGAGGCGCAAAACAGCT |
| 221 | CAGCTTTCATCAACATTAAATGTGAGCGAGTCAGCTCAT |
| 222 | GCCGGAAACGTACCCCGGTTGATATATAAGCA |
| 223 | TACTCAGCCCTCAGAACAGAGAGATAATTTTTCCACACGCCAGG |
| 224 | GAGGTTTAGTACCGCCAAAACAGGGGGGCGCGCTTTAAAA |
| 225 | TTTTTAACTATTTTGTTGCTTTAAATTCACC |
| 226 | ACAGCGCCCACCGGAAACAATCGGAAGGTGCCGTCGAGAGTATCACCG |
| 227 | GTGCCAGCTGCATTAATGAATCGGCCAACGCCAGGGTGGTTTTTCTT |
| 228 | CGCTTTCCAGTCGGGAGTTAACGGTGGTGGTTACAAGAGTCCACAATCCGCCGGGC |
| 229 | CCTGTAGCCAAAAATAATTCGCGTAAATTAAATCCTTTGCAACATTAT |
| 230 | CAGAACGATCAACTTTAATCATTGAGCTCAACAGCTTCAA |
| 231 | TCACGACGTTGAGCGCTAATATCCGCAAGTCAGATTGAATA |
| 232 | GGAATTTGTGAGAGATCAGATGATGGCAATTCCCAGAAGGGGGGAAAGTTTGCCA |
| 233 | ACGGGTAAAATACGTAGGCTGACCACGTTAATGACGGTCA |
| 234 | ACGAAGGCGCGCCGACAATGACAAGCTCCAAAAGGAGCGCAATGAATT |
| 235 | AGAGCCACCACCCTCAACCCTCAGATAGCTATAGCTAGCAAGGACCAT |
| 236 | TGAGAATCGCTTTTTATATTTAACTACCTTTTTTTTTAACCTCCGG |
| 237 | CGCAACTGCGCAGAGGGAATTAACTGAACACCAAATAGCAAACCGCCA |
| 238 | CCAGCGGTGCTTTTTGGTGCCCCCGGTATTTTTTGGGTAAAGGTTT |
| 239 | TGCATCAGACGATCCATGTAAAGCGGTCCACGAATCATGG |
| 240 | CATGAGGAAGTTTTTTTCCATTAAATAATTTTTCGATATATTCGGT |
| 241 | AATAGCAAGCAAATCAGATATAGTCAAATATATCCCAATCCAAAGAT |
| 242 | ATCGTAGGAATCATTATATAAAGCGCCAGTTAATAGCAGCCTTAGACGCTGAGAAG |
| 243 | AGGCGGTTAGAAACCAATCAATACTAATTTACGAGCATG |
| 244 | CTGATGCATTAAAATTCTTACCAGCCGCGCCCGCCTTAAATCAAGATT |
| 245 | CTTAGGTTAACAGTAGGGCTTAATAGCCGTTTCCAGCTACAA |
| 246 | CTTTGCTCGCCGGGTTACCTGCAGCGTTGCGCCTGAGAGAGT |
| 247 | TTCTAAGAAGAGGACAAGAGGCAACCGCGACCTACAACGGGGCTATCA |
| 248 | AAGGCTTAGCGAACCTCCCGACTTACATTCAACAAACGTA |
| 249 | TTGCGGGAAACGAGGGTAGCAACGAGTGAATAGATTTTAAGAACTGGC |
| 250 | ATCGGCTGTCTTTCCTTATCATTCTTAGGCAGTAAGTCCTGTGAATTT |
| 251 | GTGAATAACCTTGCTTTGTAAATGAAATGAAACAAAATAAAAGGTGGC |
| 252 | CGTCGCTACAATAACGGATTCGCCCTATTACGCCAGCTGG |
| 253 | TTAATTAATTTTCCCTTTTTTAGAATCCTTGAAAACCATAGGTCTGAGAGAC |
| 254 | CGGTGGTGCTGGTCTGGTCAGCAGTAGCTCTCACGGAAAA |
| 255 | CCATCCCACGCAACCATTTTTCTTACGGCTGGAGGTCTGTTGCCCTGCGGCT |
| 256 | AGCCGGAAGCATAAAGGCGCAGTGGAATTCGTGGTATGAGGCCGTTTT |
| 257 | GAATAATACAGTTTCAGCGGAGTGGGAACAAACGGCGGAT |
| 258 | ATTTTTTCACGTTGAATTTTTATCTCCAAAAAAAAGCAACCATCGCCCACGC |
| 259 | TTCTGTATTAGGTCACGTTGGTGTAGATGGGCCCAGGCAA |
| 260 | TTTCCAGATCCAGCCATCACCAGTAAACAAGAGGTCATTG |
| 261 | GATGAATATACAGTAAGCTGCAAGGCGATTAAGTTGGGTACGAAACGT |
| 262 | ACGTGCCGAGCGGATCAAACTTAAATTTCTGCCTGGCCTT |
| 263 | AGGCTTGCCCTGACGAGAAACACCGAAAGACCACATTCAACTAATTC |
| 264 | GATCGCACCGTTAGTACTGTAGCATTCCACAGGCGATTAT |
| 265 | GCTTTCCGGTCAATCATATGTCCAATACTGCGGA |
| 266 | GTAAAACGACGGCCATTTTTTGCCAAGCTTTCAGGTTTTCCCAG |
| 267 | ACAAAGCTGCTCATTCGCTACAGAGAAAGATTAGTAAGAGCAATGCTTTCGAGGTG |
| 268 | TAACTGATTGTTTGGATTTCAGGGCGATGGCAGCTTGACAGCGGAAT |
| 269 | TGTACATCGACATAATTTTTAAAATCCCGTAAAACGCCAGCAGT |
| 270 | AACGCCAACATGTAATCAAGAACGAATCTTACGAACAAGA |
| 271 | AGGGGACGACGACAGTTTTTATCGGCCTCAGGAAACCGTGCATC |
| 272 | TTAGACGGGAGAACCCGAAGCCCTTCCTTATTTGCAGCCA |
| 273 | GTCGGGGTCATTGCAGGCGTTTTTTTTCGCACTCTA |
| 274 | GTTTTTTCCACGGTCAGGCCAGAACGCCTGTGCACTCTGTTTCCACAC |
| 275 | TGCCGTTCCGGCAAACCTTTAGTTCGACAACTCGTAGCACTAAATCGGA |
| 276 | AATTTCTTAAAACGAACTAATTTTTGGAACAACATTATCCAGTCAGTCAACGTA |
| 277 | TGATACCGCAACCTTTAATTGTATCGGTTTTTTTATCAGCTCAC |
| 278 | AGATTTGTAACACTCATAGTTAGCGTAATTATGAAACA |
| 279 | ACCAAGTTACCAACCTAAAACGAAGATGAACGACTGACCAACTTTGAA |
| 280 | AGTCAATACAACGCTAACGATTTTTCGTCTTTCCAGAGTTTTGCACTTATTTTC |
| 281 | AATATAAAATTATTTGCACGTGCGATATTTTTCTTAGATTATAC |
| 282 | CTGTCCATAATGGAAGGGTTAGGGAACGGAACCAGGCGGATAAAATTGAGTTAAGC |
| 283 | GACGACGACAAAGCCCGAGATAGGTTAATGCGGAGAAAGG |
| 284 | GTTGAGTAAAGGGCGAAAAACCGTCTAATAAACGTGGC |
| 285 | GCGGTTGCCTGGTTTGCCCCTTTTTGCAGGCGAAAATCGCCTGGCCTCACTGCC |
| 286 | TGTTCTGCAGATACATAAGAAAGACTGAGAATGA |
| 287 | CGCCAAAGACGATAAAAACCAAAATAGACGCAGAAAAC |
| 288 | CAAAGAACCCTTAAGAAACGATTTATTAAGACTTTTAAGA |
| 289 | CCTAATTTCAACGCTCGGGTTATATAACTATACTGTAAATAGAGAGAA |
| 290 | TTCAGCTAATGCAGAAAGTAATTCTGAAACAGAAGGATTACCACCGG |
| 291 | TATGCAACTAACAGTTGAAGCGAACGAAGCCC |
| 292 | AAGGAGCGCGTAACCACCACACCCACGTATAAGGCAAAATGTGAGACG |
| 293 | CATATCCAGAACAATTTTTTTTACGATAGAACCTTTTTTTCTGATCGG |
| 294 | TACAGGTAGGCTTTGACTTGCAGGGAGTTAAAGGAATTGCTATCATAA |
| 295 | AGAAAAATCTTTCATCAAGAGTAATCTTGACATTTTTGAACCGGATATTCAT |
| 296 | TTTTATCCTGGGTATTAAACCAAGTACCGCACTTTTTCATCGAGAACAAGCA |
| 297 | CCGGAATCATAATTACATTTAATGAAACTTTT |
| 298 | TGTGAAATTGTTATCCATCTGGTCGAAGGTTAGTGAGGCGACAGACAA |
| 299 | CGCTGAGGGGACTAAAGACTTTTTTACCCAAAGACGTTGGGA |
| 300 | TGATAAGAGGTCTTTTTTTTTTGCGGATGGTCATTATA |
| 301 | AATATGATGAGAGGGTAACGCAAGCAAAGAATTAGCAAA |
| 302 | CCAGCGCCCGGAAATTCGCAGTCTCTTTTTGAATTTACCGTTCCAG |
| 303 | ATGGTTTAAACATATAAAAGAAACGTTTTTAAAGACAC |
| 304 | TTTGTCACAATCTTTTTATAGAAAATTCATAGTTGCTA |
| 305 | CTGTTTGACATCAGATGTCATAAACATCCCTTAGCACCGTTTAAAGAA |
| 306 | GGGGTCAGAATGCCCCAAATAAATCTCAGAGCCACCACC |
| 307 | TGAGGCCAGTTGCTTTGTAATAACATCACGCCCCGCCAGCATTGACAGGAG |
| 308 | CTGAGAAGATTAACCGAGTGCCACGTTTTTTGAGAGCC |
| 309 | AAGGGATTTTAGTTTTTCAGGAACGGTACGCCTTCACC |
| 310 | AGTTGGCAATGAAAAATCTAAAGCATCACCTAACAGAG |
| 311 | CTTAGAGCTCCAACAGGTCAGGATTTTTTTGAGAGTAC |
| 312 | CTTTAATTTAGTCAGAAGCTTTTTAAGCGGATTGCATACCCTG |
| 313 | TAATGCCGATTCAACCTGTGTAGGTAAAGATTCAAAAGGTTATTTC |
| 314 | AGCTATTTTTGACAGAAATTGTGGCGTTTTATCCGGTA |
| 315 | TATGTTAGCCGGAGACAGTCAAATCACCATCACGCGAGTCGAAAT |
| 316 | CACGGAATAACCGAGGAAATTTTTGCAATAATAACGAGTTACC |
| 317 | AAACAGTTTGCCTTGATAAGCGTCATACATGGCTTTTGACACAAAC |
| 318 | CTGCCTATTTCGCGCACAACATGTTGGGCGCGCGGGGAG |
| 319 | GAATCAGAGTTTTTGGGAGCTAAACAGGAGGGCAAGTGTAG |
| 320 | TCTAAAATATCTGTTGCGTCCGTGTTTAATTGTAGTAAATTGGGCTGCTCACAA |
| 321 | TTAATTCGATGATATCAAACCCTCAATCAATTGAGATGGAGCCTC |
| 322 | AAGCAAACTTAATTGCGTCTGGAAATATTTTAATTTTTTGCAATGC |
| 323 | CCGCTACATTGTTGCCTGAGTAGAGAGGCAGGGCATTTTCGGT |
| 324 | GGTCACGCTGCGGGCGCTATTTTTGGCGCTATAGATAA |
| 325 | TCAAATATCCAGAACGAGTAGATTAATACCGATCGTCTGAAAT |
| 326 | ACTATTATCTGGAGCACAAACTAATAGCGCGAAACAAAGTGCTCCAT |
| 327 | GAATCGATTCTACTAAGCTATATTTTCATTTAAGATTGATCAGAA |
| 328 | CCGAACAAGAATACCCAAAAGAACCATACATAACAGCCATGTTTTGAA |
| 329 | AGAAGGACTGAGACTATATCAAAGTACCGACAAAAGGTAACGCGCCT |
| 330 | GCAACGACCAGTAATAACGCTCAAACGAACCAATTAGTCTTTAAT |
| 331 | CAGGTCTTTCAAAAAGATTAAGAGCAGACCGGGAGATTTACCTTATGC |
| 332 | CTAGCATGCAGCAAGCCCAATAGCGAACGATCTAAAGTT |
| 333 | CCAATAATAAGAGCAAGAGCAGATAGAAACAGGGAACGTCAA |
| 334 | TTCCCAATTCTGCGCAGCCCTAAAACATCGCCATT |
| 335 | CCCTCAAATAAAATTCAAATTGTAAACGTTAATTTAAAAG |
| 336 | ATCGTCATAAATATTCATTCAAAAATTACCAGACAGGAATTA |
| 337 | CGATAGCAGCACTTTTTGTAAAACCGCCTCTTTTTCTCAGAAATC |
| 338 | TCAGTAGCGACAGAAATAGGTGGGTTGAT |
| 339 | TCTTTTAATAGCCCCCTTATTAGCGGCCTTTAGCGTCA |
| 340 | CAGGAAAAACATTTACAAACAATGATGAAGACGCCAT |
| 341 | AGTCACAATTTATTTACATTGGCAGACGCTCATGGAAA |
| 342 | CATCAATGAACGGTAATCGACCATGTACCGTATCATCG |
| 343 | GCACCATTACCATTGAAAAGGTGGATTAAGCAACGGAGATCTACAAA |
| 344 | ACCAGTAAAAGTAAAACAATGCTGAACACACCCTCGGCGATC |
| 345 | CAGAGCCAGGATTAGCGGGGCGCTTCTGAA |
| 346 | GGTCATAATCAAAATCTTTCATCGTCAGACGACGCCACCAGAACC |
| 347 | CCTTGCTAAGGGAAGATTTAGCCACTACTGATTATAGACTTT |
| 348 | CCAACAGACGCCAGCCATTGCAATTTGAGTCCGAACG |
| 349 | CGTCACCGACTTGGGGTCGGTTGTACCAAAAACAT |
| 350 | ACATTTCCCATAAATGAATCCCAAAAGAGTTAAATAACAACC |
| 351 | ATCATACCCTGAGAGTGATAAATGTTACTTAGGAACCGA |
| 352 | AGGCAAGGGATAAAAATTTTTAGAACCTTTTTTCATGTTTCATT |
| 353 | TTTGGGAATTAGAGCCAGCAAGCCGCCACC |
| 354 | CTCAGAATTAAGAGGGCCCGTATGTTTATCAATCCCATC |
| 355 | CCGCCACCCCTCATTAAAGCCAGAATGTTTTTAAAGATTCATTA |
| 356 | GTAAGAAAGCCGTCAGTTGAAAGCCCGGGTAGTTTCCTGAACATACG |
| 357 | TATTTTTATTCTGGGAAGTATTAGACGTTATGCTGATCGTGCC |
| 358 | CTGAGTAAGTTCTAGCGCTCCTTTATCATAAGGCCGGAAC |
| 359 | AAGGTGAAAATATTGAAAAGACAAAAGGGCGGCGGGAG |
| 360 | GTCAGTATTAACACCGCCTTTTTTCAACTTGTAGCAATACTTCT |
| 361 | GACTGTAGCGCGTACCGGAACCTCAGAGCGGGGAACCTATTATT |
| 362 | CCATATAAAGTACGGTTGAATATAATGCTGT |
| 363 | AGAGTCTGTCCATTGATTAGACGAGCGCCGCGC |
| 364 | GGGAGGGAAGGTATTATCACGAAAATATGGCATG |
| 365 | TCACGCAATGTTTTTATAATCAGTTCACCACCCTTATAAATC |
| 366 | AGCAGCAAAATCAACAGCCGATTATCATAGCTCCGAGCTCTCACTGCG |
| 367 | TTTGTTTAAGCGCATATGTGACCAAGTTAAGTACT |
| 368 | TTATACATTTCATCTTCTGACCTAATAGAAAAATCGCAAGACAATTACC |
| 369 | TGTTAAATAAGGACCCCCAACAGCCCTGAGTTTCG |
| 370 | ATTATTTATTTTAGAATCCAAGCCTGTTTAGTATCATT |
| 371 | AAGAATACACTAAAGAGTTTGAAATACCGACCGTGTGATAAAT |
| 372 | TCAATATGAGCAAAATGGAAACCAAAATCGTTGGGAAG |
| 373 | TACATTTAACATTGTCGTCAGCGCCATCTTCTGGT |
| 374 | GCGAACACTCATCTTTAATAAACAAACATCAAGAAAACAAAAT |
| 375 | TTAATTCAGCAAATCAACCTGTCGGCAACAGCTGATTGCCCAGAATCCCTCGTTA |
| 376 | TATGCCAGTAATAAGAGATCAAAATATAAAAACAGAAATAA |
| 377 | AGGTGGAGTAACGTCAAGAAATTGCGTAGATTAATT |
| 378 | GTAACAGTAAGTTTATAAAATAATACAATAGAAGGCATTTTCGAGCGTT |
| 379 | TGGGCGGTTGATCAAGTTTTTTGTCCGTGAACCAAGAATTT |
| 380 | ACCCTAAAGGGAGCCCCCGAAAGCGACCAACGTCGTTGTTCCGTGGGCT |
| 381 | TTTAATGCCAACGGCACACTGGTAGTTTGGACCGAAATCCGTGCTTT |
| 382 | TATATTCAGGTTCCGCCACGAACCTACCCCTCAAGATGAAAGTA |
| 383 | AAAGCCGCACATCCTCTCGCTGGCAGCCTCCGTTTT |
| 384 | TGCCAGTTTGGTAATAGTAAAATTTTAGTTTTGCAAGCCAT |
| 385 | TGAATTAGGAATACAGCATCGGTCGTCACCCTCAGCAGCAGT |
| 386 | TTGCGCCAGAGCACAGGCGGCGCGGTCCTACATTTGTAGATTAGTACGTGGC |
| 387 | TACGGGTGCTGCTACCGGGGTGAGGATCGAATTGAG |
| 388 | TTAAGAACAACTAAAGGCCGCTTCGAGGCATCATCAGTT |
| | H1 design oligo sequences (5′-3′) |
| 389 | GCAGTAGAGTAGGTAGAGATTAGGCAAGAGACGTTTTTAGAAACGACTTGTAGAATTTTTGTCAGCGTGGTG |
| 390 | GCAGTAGAGTAGGTAGAGATTAGGCACGAAAGGTTTTTGGATGTCAGTACCTTTTTTTTTCATCGGGAGAAA |
| 391 | GCAGTAGAGTAGGTAGAGATTAGGCACGTCGGATTCTCCGTGAGAATAGACAGAGGGGCCCTCGTT |
| 392 | GCAGTAGAGTAGGTAGAGATTAGGCACTCCGTGGTGAAGGGACAACCGCATCACCCAACGTGGACT |
| 393 | GCAGTAGAGTAGGTAGAGATTAGGCAATAAGTATATCAATATAATCCCTATGTTTACCAGTCCC |
| 394 | GCAGTAGAGTAGGTAGAGATTAGGCATTATTAATCAATAGGAGGTAAAGTTAACGAGAGGCTTTTG |
| 395 | GCAGTAGAGTAGGTAGAGATTAGGCATGACCGTTTTTTATGGGAGGGATTTTGCTTTTTTAACAACTTTCAA |
| 396 | GCAGTAGAGTAGGTAGAGATTAGGCAGGTGCGGGCCTCTTCGTGATTGCTGGGTAATTTAACATAA |
| 397 | GCAGTAGAGTAGGTAGAGATTAGGCAAAGCCCCATTTTCAGGGATACCGTCGCCATTCAGGCTG |
| | H2 design oligo sequences (5′-3′) |
| 398 | GCAGTAGAGTAGGTAGAGATTAGGCATTTTTTTTTTTTTTTTTTTTAGAGACGTTTTTAGAAACGACTTGTA |
| | GAATTTTTGTCAGCGTGGTG |
| 399 | GCAGTAGAGTAGGTAGAGATTAGGCATTTTTTTTTTTTTTTTTTTTCGAAAGGTTTTTGGATGTCAGTACCT |
| | TTTTTTTTCATCGGGAGAAA |
| 400 | GCAGTAGAGTAGGTAGAGATTAGGCATTTTTTTTTTTTTTTTTTTTCGTCGGATTCTCCGTGAGAATAGACA |
| | GAGGGGCCCTCGTT |
| 401 | GCAGTAGAGTAGGTAGAGATTAGGCATTTTTTTTTTTTTTTTTTTTCTCCGTGGTGAAGGGACAACCGCATC |
| | ACCCAACGTGGACT |
| 402 | GCAGTAGAGTAGGTAGAGATTAGGCATTTTTTTTTTTTTTTTTTTTATAAGTATATCAATATAATCCCTATG |
| | TTTACCAGTCCC |
| 403 | GCAGTAGAGTAGGTAGAGATTAGGCATTTTTTTTTTTTTTTTTTTTATTAATCAATAGGAGGTAAAGTTAA |
| | CGAGAGGCTTTTG |
| 404 | GCAGTAGAGTAGGTAGAGATTAGGCATTTTTTTTTTTTTTTTTTTTGACCGTTTTTTATGGGAGGGATTTTG |
| | CTTTTTTAACAACTTTCAA |
| 405 | GCAGTAGAGTAGGTAGAGATTAGGCATTTTTTTTTTTTTTTTTTTTGGTGCGGGCCTCTTCGTGATTGCTGG |
| | GTAATTTAACATAA |
| 406 | GCAGTAGAGTAGGTAGAGATTAGGCATTTTTTTTTTTTTTTTTTTTAAGCCCCATTTTCAGGGATACCGTCG |
| | CCATTCAGGCTG |
| | H3 design oligo sequences (5′-3′) |
| 407 | GCAGTAGAGTAGGTAGAGATTAGGCATTGCAGTAGAGTAGGTAGAGATTAGGCAAGAGACGTTTTTAGAA |
| | ACGACTTGTAGAATTTTTGTCAGCGTGGTG |
| 408 | GCAGTAGAGTAGGTAGAGATTAGGCATTGCAGTAGAGTAGGTAGAGATTAGGCACGAAAGGTTTTTGGAT |
| | GTCAGTACCTTTTTTTTTCATCGGGAGAAA |
| 409 | GCAGTAGAGTAGGTAGAGATTAGGCATTGCAGTAGAGTAGGTAGAGATTAGGCACGTCGGATTCTCCGTG |
| | AGAATAGACAGAGGGGCCCTCGTT |
| 410 | GCAGTAGAGTAGGTAGAGATTAGGCATTGCAGTAGAGTAGGTAGAGATTAGGCACTCCGTGGTGAAGGGA |
| | CAACCGCATCACCCAACGTGGACT |
| 411 | GCAGTAGAGTAGGTAGAGATTAGGCATTGCAGTAGAGTAGGTAGAGATTAGGCAATAAGTATATCAATATA |
| | ATCCCTATGTTTACCAGTCCC |
| 412 | GCAGTAGAGTAGGTAGAGATTAGGCATTGCAGTAGAGTAGGTAGAGATTAGGCATTATTAATCAATAGGAG |
| | GTAAAGTTAACGAGAGGCTTTTG |
| 413 | GCAGTAGAGTAGGTAGAGATTAGGCATTGCAGTAGAGTAGGTAGAGATTAGGCATGACCGTTTTTTATGG |
| | GAGGGATTTTGCTTTTTTAACAACTTTCAA |
| 414 | GCAGTAGAGTAGGTAGAGATTAGGCATTGCAGTAGAGTAGGTAGAGATTAGGCAGGTGCGGGCCTCTTCG |
| | TGATTGCTGGGTAATTTAACATAA |
| 415 | GCAGTAGAGTAGGTAGAGATTAGGCATTGCAGTAGAGTAGGTAGAGATTAGGCAAAGCCCCATTTTCAGG |
| | GATACCGTCGCCATTCAGGCTG |

TABLE 4
Staple sequences used for the T1 ring triangle folding

| SEQ | |
|---|---|
| ID NO: | |
| | Core structure oligo sequences (5′-3′) |
| 416 | GCAAAGACAAGGTGGCAACATATATGGTGATGGTGGTTCCGAATAGCC |
| 417 | TTCCATTATAAATTGGGTCAGGACACAGGTAGAGGTCTTTA |
| 418 | ATGCGCCGCTACAGGGAACGTGCTGGAGGCCG |
| 419 | TCTCACGGTACATCGACATGGAGAGGGTAGCT |
| 420 | GGGATAGCGGAACGCCTCTGGAGCAAACAAGAAAAGGCCG |
| 421 | AGAGAGAAATTGAGTTAAGCCCAAGAGATAAC |
| 422 | TTTTTCAAAATTTAAGACGCTAATTTTC |
| 423 | CCTGACTATTATAGTCAGCTTCAATGAATTACCAACAGTT |
| 424 | CGGAACAAGATTTACACCAGAAACAAAGAAAACGAAAGCGCG |
| 425 | CGGTGCCCTCGTTAACGGCATCACCACGGGACAGCGGTTTGTTA |
| 426 | GCGGTGCTGTCACTCGGGCGCCCAGCATCCGCCAG |
| 427 | AACAACATGTTCAGCTCGAGCATGTTTTTAACCAAATATCCTAAAGCA |
| 428 | TCTGACCTAATATATTTGCAAATCCAATCGC |
| 429 | GAAATACAAATGCTTTAAAAGATTAAGAGGCGCGAGAAAAC |
| 430 | ATCAGTTGACATTATTGTTGGGAAGAAAAATGGGAGTT |
| 431 | GGAATACCACATTTACGAGCCGGAACCTGTCGTGCCAAAACGAACTAA |
| 432 | GCGCGCCTGTGCAAATAAGAGAATAACAATAGATAAGACCTGCAGCCA |
| 433 | AAATAAGGCGTTATATATTAATTGAGAAGAGAACCTACCACAAAGAA |
| 434 | GCGGAATCGAGAATGACCATAAATCAATTTTTAATCAAAGATTC |
| 435 | CAATACTTTGATAAGAGCGAACCATTTTCTGTCAGCGGACGAATAAT |
| 436 | TTACGGGAATCAACGTACGAGTAGAACGGGTAAAAGGCCG |
| 437 | TGAAATTGGCCTGGGGTGCCTAATGAGTTTTTGAGCAGACGATCCAGCGCAG |
| 438 | TCCTGTGCCGCCTGGGTATTGGGGGGACGACGCCAGCTT |
| 439 | CATGTAATAAGGTAAAGTAATTCTGTCTTTTTAGACTTTCATCT |
| 440 | ACGCCAACCGCACTCTAGAAACCTGAAAAATAAACCCTC |
| 441 | AGAATAACTTTTTTCAAGAAAGCTTTGATTGCTATTTATTTA |
| 442 | ACGTTATACAACTAAGAACCCATAGACGTTAGCCCTCATCCTTTAAT |
| 443 | ACAAACAATTCGACAACTCGTATCTGGCCAAAATTATTTGCACGAAG |
| 444 | ATACATTTGAGGATTTAGAAGTATGAAAGCGT |
| 445 | TTAATGCGCGAACTGACTAAAATAAATTCATCCTGAACCT |
| 446 | GGCGAAAGGGGGATGTGCTGCAAGAACCAATA |
| 447 | GTCTGGCCTTTTTTTCTGTAGCCAAAGGTTTTTTATCAGGTCATTG |
| 448 | GCTTTCATCAACATTAGCGCAACTGAATTTGTGGAAGATC |
| 449 | GTTGGGTAACGCCAGGGTTTTCCTGATAATCATCAAACTTAAATCTG |
| 450 | ACCGCCACCCTTTTTCAGAACCGCACGGTTTTTGTCAGTGCCTTGA |
| 451 | CACCCTCAGAGCCACCAAATCTCCAGCAACGGACAACTTT |
| 452 | ATAGCAAGCCCAATAGAGGAATTGGTGAGAATAGAAAGGA |
| 453 | TTTTGAATGGTTTTTTATTAGTCTAGTATTTTTAAGAACTCAAACT |
| 454 | AAAACGACGTTGGCAAATCAACAGAATCAATATCTGGTCA |
| 455 | CTTGCTTTCGAGGTGAATTTCTTATACTCAGG |
| 456 | AATTTTTTCACGTTGAACCCTCATTTTGCTAAATGATACAAACGCCTG |
| 457 | CCTGAGAGATCAAAAATAATTCGCCGCCAGCTCGCCATGTTT |
| 458 | TACGGTGTATTTTATCCATTACCAGGCGCTAGGGCGCTGCGCGCTTA |
| 459 | GCAAAATCTTAGCTATATTTATAACCACGG |
| 460 | CGAGATATCCACTATTATTTTCGTCTCTTTTTTCGCGCAA |
| 461 | AAAACGCTCTATAAAACAGAAATACCTTAGAATGAATTAC |
| 462 | TACCGCCAAGAACCCTTCTGACCTTAGACTTTACCACCAGAAGGAGCG |
| 463 | ATCGGCCTGTGGCACAGACAATATAATAGATACCTGATTATC |
| 464 | GCGCATTAGATCGCGCAGAGGCGTAGATACCAAG |
| 465 | TTTGCACCCAGCTACAGAGGTTTTAATTACATAAAAATTACTAGAAAA |
| 466 | CATCAATATTTTTGATATTCAACCGTTCTCGTGAGAGATCTACA |
| 467 | TAAAGGTGAAAATCCGCGACCTGCATTGATAAATCCGCCTCC |
| 468 | CCAAAAGAACAACGCGGTCCGTTAAGGATTGCCGTGTACCA |
| 469 | GTCAAAGGCAGTTTGGGTAGAACGGTAGGGGGTTTCTGCC |
| 470 | GACGATTGTTTTTCCTTGATATTCACAACTGGTAATAAGTTTTA |
| 471 | AGTTGATACCATTAGATACTCCATGTTATTTTTTTAGTTGACGGA |
| 472 | GTAACAGTTACCGCCACCCTCAGATTTATCAGGACAGCATCG |
| 473 | AATCAGTGTTTTTGGCCACCGAGTAAAAAAACATCACTTGCCTG |
| 474 | TTAACGTCTTTTTAAAATGAAGGGAGCCCCCTTTTTATTTAGAGCTTGGTTTTTAT |
| 475 | CTCAGAGCATAAAGCTTAAGAAAAGTAAGCAGATAGCCG |
| 476 | TAATTTGCCAGTTACAAAATAAAAAGGAGCGTTAGATTCGCCTGATT |
| 477 | GTCATAGCTGTGTCGACCCCAGCGTGGCTGACTTACCCAATAGCGTC |
| 478 | TTCATCGGCATTTTCGAGCGCCAAAGACAAAAGGGCGAC |
| 479 | GAGAAAGGACAGGAACGGTACGCAACAATATTTTTCAGG |
| 480 | GTAATTGAAAGTTTTTCAAGCAAGACCAAGTA |
| 481 | ACAAATAACTCTGAATTTATTTTTCGTTCCAGTTCAAGGTTGAG |
| 482 | ATCCTATCAGGGCGATGGCGGGTAAAGTTAAACCGGACTTAACAAGAGGGGTTGAG |
| 483 | TTCCGGCAGTAAAAAAAATGCCAATTACGGCTAGCTGTT |
| 484 | TACTCATTTGGGGCGCGACGGAGATTTGTATTGACCAACTTAGTTTGTCCCAATT |
| 485 | TTATCACCGTCACCGTTTTTCTTGAGCCATTTGGAATTATTCAT |
| 486 | GAATTAGAAGTAGCGATAAAGCCATAGCAGCAAGTTTCGTCACAGACAGTAAATGA |
| 487 | AATCACCAGTAGCTCAACATGGAACGAGGCGCAG |
| 488 | GGTAAATAGCGTCTTTCCGTAATCGCCAGCAAACCATCGATTTGCGGATGCTCCTT |
| 489 | AAAATCCCTGGCATGATTAAGACTTTTTCCTTATTACGCAGTAACGGAATAC |
| 490 | ATTCTACTAAAATACACGAAAATCCTGTTCAGCCTCCGGCCA |
| 491 | TACAAGCTGATGAACGTCAGTGAAACACAACTAATCGCCAAAAGGAA |
| 492 | AGCGCAGTATCCTCATCAGAATCAAGTTTGCCCGATTGAGGGAGGGAA |
| 493 | ATAACGGCAATTTCATTTCCTTGAACCTCCGACCGTGTGAT |
| 494 | GTAACAGTCAGTACATATCGTCGCTTTAACA |
| 495 | AATATACACGGGAGAATTAACTGTTTTTACACCCTGAACAAAAAACAGGGAA |
| 496 | AGCAATACATGTGAGAAGTACGGGGAAAGCCGGCGAAACGATTTTTTGT |
| 497 | AATAAATAAATATAATCCTGTTTTTTTGTTTGGATTATATCATATT |
| 498 | ATTAACACCGCTTCTGCTCATTTGCAGCGGGGGTCTGGTC |
| 499 | ATTTTGATGAGAGATAGACTTTTTTTCTCCGTGGTGAAACGTACAG |
| 500 | GAACAAAACATCCAATAAATCTGATATTTTTATTAATGCCAAAGAGACAGT |
| 501 | ATTCAACTTTAGCGTCAGTTTTTCTGTAGCGCGTTGCAGGTCA |
| 502 | GGCTTTTGCTACAGAGGCTTTTTTTGAGGACTAAAGACCAGCGAAA |
| 503 | GTAACGATCCAGTCACACGACCGTAACACTGAGCGGTCCCAATGAA |
| 504 | GCGCTAATGCGCCCAATAGCACCTGAGCAAAAGA |
| 505 | TCACCTTGCCGAACGAACCACCAGAGGACGCAAATTAACCGTTG |
| 506 | CCACGCTGAGAGCCAGGTGAGGCGGTATTAACCGTTTTTGTAGGGCT |
| 507 | ACACCGGAATCATAGAAGTTTTGCTGAATCCC |
| 508 | ATGGGTAAGTGGTGCCATCTTTTTCACGCAACCAGCCGGCAGC |
| 509 | AACCGTGCATCTGCCATGGGATAAGCTGATTGCAAGCGG |
| 510 | CACTACGGGGTTGCCCTGATAGCTGCATTAATGAATCGGCCTAACCGA |
| 511 | AACAAAGATTAGCAAAATTTTTTAAGCAATAAAGCCAAATCAC |
| 512 | AGATAAGGCACCAACCTCTGCTCATGTGTACAGAGCAACACTATCATGAGG |
| 513 | GAGGAAGTCACTAAAACACAAGCGTCATACAT |
| 514 | TTTTTCATAGGTTTAGGCCCGTATAAACAGTTTTGACAGGTCTTTGAC |
| 515 | TATGGGATTTTCAGGGCAAACTACGGAGTGTA |
| 516 | CCACGCAGTGCCGGAAACCAGGCTCCGGCACCGCTTCTG |
| 517 | GATACCGATAGTTGCGCCGACAAAGGCTGAGTAATGC |
| 518 | ATAATGGATTTAACGTCAGTTCTTTGATTAGT |
| 519 | ACTTCTGAAAGAATACTGCTGGTAATATCCAGCAGAATCC |
| 520 | AGATGATGGCTCTTTAGGAGCACTAACAACTATTTTTTAGATTAGAGCCGTC |
| 521 | ACCAGTCCCGGTTGGGAAGGGCGATCGGTGCGTTTTTGCCTCTTCGCTATTA |
| 522 | GAACGAGGGTAAAAAAAAGGCTCCAAAAGGAGTTTTTCTTTAATTGTATCGG |
| 523 | GAGTAACATTATCATTAAGACAAATTAGATTAATGGTTT |
| 524 | AGGGTTAGTCAATAGTAATGCTGATTAGTTAAGACGACAAT |
| 525 | CTCCGGCTTAGGTTTTTTGGGTTATATAACGAATTATC |
| 526 | ATCCCATCATCGGCTGACCGACAATTAGGCAGAGGCATT |
| 527 | TCAGCAAACCTGCATCTAACTCACATTTTTTAATTGCGTTGCGCTC |
| 528 | TGGTGTGTGGGTCACTGTTGCCCTGTTTTTGGCTGGTA |
| 529 | TTGCTCGTCATATTTTTACATCCCTTACACTCGGCGAA |
| 530 | CGGTTTGCAGGTTTCTGCACTCCAGACAGTATCGGCCTCATCTCCGTGG |
| 531 | AACGCGCGTGGTTTTTAGTGTAAATTATCCGCTCACAAT |
| 532 | TTATACCAGCTTGAGATGGTTTAATTTTTTTCAACTTT |
| 533 | CTTATGCGATTTTTTTTAAGAACTGGCTCAACCCTCAG |
| 534 | ATCGCGTTAGCAAACTCAGAAAACGTCATAAATATTCAT |
| 535 | TATATGTAGAATTTATCAAAATCATTTTTTGGTCTGAG |
| 536 | AGACTACCGAGTGAATAACTTTTTTTGCTTCTGTAAAAATCAA |
| 537 | AATCAATACTAATTTAAATGCAGAACGCGCCTGTTTATCATAAAGT |
| 538 | TCTTTCCTTATCGCTCAACAGTGGCCAAGCTACGTTGT |
| 539 | TTCGCACTGTTTCCTGAACAAGAAAAATAATGGCCAGT |
| 540 | TTTGAAAGAGTTAACCCTCGTTTACCAGACGACGAT |
| 541 | CGCCAGGGGGGAGAGGACTGCCCGCTTTCCAGTCGGGAAAGCATAA |
| 542 | CTTTTCACCAGTGGCCGCATCGTTATATTCGACCATCGC |
| 543 | AATCATTGATCTTGACAAGTTTTTACCGGATATTCACTTCATC |
| 544 | AGACCGGATTAATTCGAGAAGCAAAGCGGATTGCATCAAAACAGTT |
| 545 | CCAACAGGTCAGATATTTTGTCGAAAAGTTTTTGCCCGA |
| 546 | GCGATAGCGAAAAGCCCGAAAGACTTCAAATTAATTTT |
| 547 | GGCATTCCAAGAACGGGTCAGTACCATCACCCAAATC |
| 548 | TCATTGCAAGTCTCTGTGGTGCTGCGGCCAGAATGCCAT |
| 549 | GGAGGTGTGGTTGCGGACGCAGAAAACGGATA |
| 550 | AACGATTAGAGAGTAAGTTAGCAACGTCAGAGCGGGAG |
| 551 | TATATGTATCGAGAATGGGGTCGCAGAAGATAAAACAGAGCAGCAAA |
| 552 | ACCGTCGCCCTGAGATAGCATTACGGCGGATTGACCGTAAGTTTGAG |
| 553 | AAGAGTAAGGTCATTGAATGGAATAGCATTCCACCAGTA |
| 554 | TGGCTTAGGGTAATAGCCAAAATAGCGAGAGTTCATTCACTAAAG |
| 555 | GAGCACATCCTCATAACGACCGCAAGAGCCGCACCAGTTGGG |
| 556 | GCTTTTGCTTAGAATATAATGCTGTAGCACCTGAATC |
| 557 | ACCGAACCATCGCCTTCGCAAATAGAAAATTCATATGGTTTACC |
| 558 | ACGGTCAATCATAAGGGAGCATAGGCATTATACCAAGAGGCA |
| 559 | ACAAAATTGAAGCCTTACCTCCCGACTTGCGGCTGGAAGT |
| 560 | AGATGATGAAACAAACATAATGGAAAACCTTTTATGCGTAGA |
| 561 | ATGCGTTATACAAATAGAACGCTAGAAGGCTTATCCG |
| 562 | AGCACGCGTGCCTTTTTGTTCATTCGTAATTTTTTATGGTGGCGG |
| 563 | AAAATAAAATGTTTTTTTAGACTAGGCATAGTAAGACCAGGC |
| 564 | GCCGTTTAGCAGCAGAACGTGCGATGCTAACGTGGAGCTATC |
| 565 | AGCCTGTTTAGTTTTTTTCATTAATTGAGATTTTTTCGCCAAATA |
| 566 | CTCAACAATTTTCATCGTAGCGCTACGTGA |
| 567 | TCACGGTCATACCTAAAGCCAACGTTCGAGCC |
| 568 | GGGTACCTCCACGCTGGTTACAGAAAAGGTTTGGTGT |
| 569 | GAGCTCGATTCGCGTCCGTGAGCATCAAAAGAAATCG |
| 570 | ATCCCCTCCACACATAAGAGACGGGCAACGGTCACGGGCATCA |
| 571 | CAGAGGGAGCTTAATTGCTACAAGGCCGGA |
| 572 | TTTTTAAACAGGAAGATTAACTAGCATGTCAATCATATTTTT |
| 573 | TTTTTCAATGCCTGAGTAATGTGTCTTTAGTGATGAACCATGGTGCTG |
| 574 | TTTTTAGCACTAAATCGGAACCCTAAAAATAGCAGCCTTTAC |
| 575 | TTTTTCATCGCCATTAGAGTCTGTCCATCTGCCGTAATTTTT |
| 576 | TTGAAAGGAATTGAGGAAGGTTATTAGCCCTAAAATTTTT |
| 577 | TTTTTTGTACCCCGGTCAGTCACGTTCAGAGGTGGAGCCGGATGCCGGCAATCCGC |
| 578 | GCGAAAAACCGTAGATAATAAGAGCAAGAAACAATGAATATTTTAAATGTTTTT |
| 579 | TTTTTTAAAGGGTGAGGAATCGATCGGTTGTGAAAAAGAGTATGAGCC |
| 580 | GATTCAAATACTTTTGAAATATTTAAATTGTAAACGTTTTTT |
| 581 | GAACGGTAAATCAGCTAAATTCGCATTAAATTAGAAAAGCCCCAATTTTT |
| 582 | TTTTTTAATATTTTGTTACATTTTTTGCGATTAAACCTCACCGGAAACAA |
| 583 | TTTTTCGCAAGGATAAAACCCTCATAATAGCAATACTCCAAC |
| 584 | ATCGTAAGTATAAGCCGGGAGAAGCCTTTATTTCAATTTTT |
| 585 | AGGCGGCAGGTAAAAAATAGAAATTTTACATTATGACCCTGTTTTT |
| 586 | TTTTTGCCACCACCCTCAGAGCCGCCTCTGAAACATGTTTTT |
| 587 | AAAGCGCCATTCGCCATTCAGGCTAATGTGAGCGATTTTT |
| 588 | TTTTTGTAACAACCCGTAGCATACAGGTTTTT |
| 589 | TTTTTCAAGGCAAAGATTACCAGAAGGAAACCGAGGAAACAAAGAAAC |
| 590 | TTTTTAAAGTATTAAGTGACAACAGTCGCTGAGGCTTGCACTACGTTAACGAGAAA |
| 591 | CACCACCCTCAGAGAGAGCCACCACCGGAACCCCTTATTAGCGTTTTT |
| 592 | AGAGCCGCCATAATCATTGCTCAGTACCAGGCGGATATTTTT |
| 593 | TTTTTAGGATTAGGATTACCTATTATACCAGAACAAACAAAG |
| 594 | TTTTTACCCCGCCACCCACAATCAATGGTCAATAACCTGTGAGTAGAT |
| 595 | CTGCCTATAATAGGTGGGGTTGATATAAGTATACTCCTCAAGAGATTTTT |
| 596 | AAATACGAGCCCGGTTCGGAAGCGGGGTTAAATCACCGGATTTTT |
| 597 | TTTTTTTTGCCATCTTTTCGCCAGCAAATGCCCCAAAGAATA |
| 598 | TTTTTAGTGCCGTCGAGATATCACCGAACAGCTTCTTTTGCGGGATCGTC |
| 599 | TTGCGGAATATCAACAGAGATGCCATTGTTTTGT |
| 600 | AAGAAATCATCGGGGATTTTAGAAGGGAAATGGTT |
| 601 | CTAAACATTCCTCGTTAGAATCAACGCTGCGCGT |
| 602 | TCTTTCCGTACCAGTAATAAAATACATTGG |
| 603 | CTCAATCGTCTGAAATTACCTACACAACAGGAATTAAAGGAGAAACA |
| 604 | TATTCACATGGAAAGGATTATTGGGACATTTAAATCCT |
| 605 | TCCACACCCGCGCAAGTGTCCAGAGCCTTACCAAC |
| 606 | TGACGAGCACGTATCGCGTACTGAAAGCGACAGCCATA |
| | H1 design oligo sequences (5′-3′) |
| 607 | GCAGTAGAGTAGGTAGAGATTAGGCACCACAAGATTAAGCAAATCAGATAGAGGCGTTTTTTTTAGCG |
| | AAAATCAA |
| 608 | GCAGTAGAGTAGGTAGAGATTAGGCATAATATGTTAGCAAACGTAGAATAGTAGGAGTTGCAGCCCTT |
| | CA |
| 609 | GCAGTAGAGTAGGTAGAGATTAGGCAAATAAGTTTATTTTGTCTCAGAACCGCCACCCTCAGATTTTT |
| 610 | GCAGTAGAGTAGGTAGAGATTAGGCATCCCAATCCAAATAAGAACGTGGCTTACAAAA |
| 611 | GCAGTAGAGTAGGTAGAGATTAGGCACTGCGAACCCTTATAACTCCTCACAGGTGCCCCAGCAGG |
| 612 | GCAGTAGAGTAGGTAGAGATTAGGCATTACCGAAGCCCTTTTAAATCGGT |
| 613 | GCAGTAGAGTAGGTAGAGATTAGGCAGCTAACGACCGTTTTAAATATGCACATATAAC |
| 614 | GCAGTAGAGTAGGTAGAGATTAGGCAGATAATTATTCATTTTTTTCAATAACATAAGTCAGAGG |
| 615 | GCAGTAGAGTAGGTAGAGATTAGGCATGTTGTTCGTATTCTATCTTACCATCAGGAATCATTACC |
| | H2 design oligo sequences (5′-3′) |
| 616 | GCAGTAGAGTAGGTAGAGATTAGGCATTTTTTTTTTTTTTTTTTTTCCACAAGATTAAGCAAATCAGATA |
| | GAGGCGTTTTTTTTAGCGAAAATCAA |
| 617 | GCAGTAGAGTAGGTAGAGATTAGGCATTTTTTTTTTTTTTTTTTTTAATATGTTAGCAAACGTAGAATA |
| | GTAGGAGTTGCAGCCCTTCA |
| 618 | GCAGTAGAGTAGGTAGAGATTAGGCATTTTTTTTTTTTTTTTTTTTAATAAGTTTATTTTGTCTCAGAACC |
| | GCCACCCTCAGATTTTT |
| 619 | GCAGTAGAGTAGGTAGAGATTAGGCATTTTTTTTTTTTTTTTTTTTCCCAATCCAAATAAGAACGTGGC |
| | TTACAAAA |
| 620 | GCAGTAGAGTAGGTAGAGATTAGGCATTTTTTTTTTTTTTTTTTTTCTGCGAACCETTATAACTCCTCAC |
| | AGGTGCCCCAGCAGG |
| 621 | GCAGTAGAGTAGGTAGAGATTAGGCATTTTTTTTTTTTTTTTTTTTACCGAAGCCCTTTTAAATCGGT |
| 622 | GCAGTAGAGTAGGTAGAGATTAGGCATTTTTTTTTTTTTTTTTTTTGCTAACGACCGTTTTAAATATGCA |
| | CATATAAC |
| 623 | GCAGTAGAGTAGGTAGAGATTAGGCATTTTTTTTTTTTTTTTTTTTGATAATTATTCATTTTTTTCAATAA |
| | CATAAGTCAGAGG |
| 624 | GCAGTAGAGTAGGTAGAGATTAGGCATTTTTTTTTTTTTTTTTTTTGTTGTTCGTATTCTATCTTACCAT |
| | CAGGAATCATTACC |
| | H3 design oligo sequences (5′-3′) |
| 625 | GCAGTAGAGTAGGTAGAGATTAGGCATTGCAGTAGAGTAGGTAGAGATTAGGCACCACAAGATTAAG |
| | CAAATCAGATAGAGGCGTTTTTTTTAGCGAAAATCAA |
| 626 | GCAGTAGAGTAGGTAGAGATTAGGCATTGCAGTAGAGTAGGTAGAGATTAGGCATAATATGTTAGCAA |
| | ACGTAGAATAGTAGGAGTTGCAGCCCTTCA |
| 627 | GCAGTAGAGTAGGTAGAGATTAGGCATTGCAGTAGAGTAGGTAGAGATTAGGCATAATAAGTTTATTT |
| | TGTCTCAGAACCGCCACCCTCAGATTTTT |
| 628 | GCAGTAGAGTAGGTAGAGATTAGGCATTGCAGTAGAGTAGGTAGAGATTAGGCATCCCAATCCAAAT |
| | AAGAACGTGGCTTACAAAA |
| 629 | GCAGTAGAGTAGGTAGAGATTAGGCATTGCAGTAGAGTAGGTAGAGATTAGGCACTGCGAACCCTTA |
| | TAACTCCTCACAGGTGCCCCAGCAGG |
| 630 | GCAGTAGAGTAGGTAGAGATTAGGCATTGCAGTAGAGTAGGTAGAGATTAGGCATTACCGAAGCCCT |
| | TTTAAATCGGT |
| 631 | GCAGTAGAGTAGGTAGAGATTAGGCATTGCAGTAGAGTAGGTAGAGATTAGGCAGCTAACGACCGTT |
| | TTAAATATGCACATATAAC |
| 632 | GCAGTAGAGTAGGTAGAGATTAGGCATTGCAGTAGAGTAGGTAGAGATTAGGCAGATAATTATTCATT |
| | TTTTTCAATAACATAAGTCAGAGG |
| 633 | GCAGTAGAGTAGGTAGAGATTAGGCATTGCAGTAGAGTAGGTAGAGATTAGGCATGTTGTTCGTATTC |
| | TATCTTACCATCAGGAATCATTACC |

TABLE 5
Staple sequences used for the T3 triangle 1 folding.

SEQ ID NO:

Core structure oligo sequences (5′-3′)

| | |
|---|---|
| 634 | TATCAGGGACGGGGAAAGCACTAAAGCGGGAGTAGACAGG |
| 635 | AGAACGGGATCCGGTAAGCAGCCTTAACGTCAGTGAGAGA |
| 636 | AAAGTGTCTGCCCGCTTTCCAGCGGTGCCGGGGGTTTCTGCCAGC |
| 637 | TATTAGCTGGTAATATAATACCTATCCTCGTTCAGGGCGC |
| 638 | GGAAACAATCGGCGAAGATAGCTCAAGAAACACGGAATTT |
| 639 | AACAAAATTAATTACATAAGTATACCACCCTCAGACTCCT |
| 640 | GCAGAGGCATAACGGATGAGTTTCTCCACAGACCTTGAGCAAATAA |
| 641 | CCACCCTCTAGGTGTATCACCGTAAAACAAACTTACCTGA |
| 642 | TAACAGTGCCCGTATAGGTCAGTGCAGCCCTCATAGGAGCGTAGATT |
| 643 | CATACTGGTAATAAGTTTTAACGGAACAGTTACATGTACGGATAGC |
| 644 | TTCTAAGAGAGAAACAGAATTATTCAGAGCCAGCCCGGAA |
| 645 | AATAATATCGTTTTAGCGAACCTCACGATTTTTCTTACCAACG |
| 646 | ATCGTCGCGATGCAAATCCTTTTTATCGCAAGACAAAGATGATG |
| 647 | AGCGGTGCTCGGGAAAGATCCCCGACACAACAGCAGCAAGCGG |
| 648 | AATAAGAACCGACTTGCGGGAGGTAATAGATAAGTCCTGA |
| 649 | CAAGTACCGCACTCATTAGGAATCCTCACATTGTGTCACT |
| 650 | TTCGCCTGTTCAGGTTTTACAGAGCGGCAATAATAAGAGCTCACGGAATTCTCCGT |
| 651 | GTAGAAGAACTCAAATCTTTGATCAAATTAACCGTTGTA |
| 652 | GAATGCGGCGGGCCGAGGCGGATGTGTTTTTCTTTTCTGAAACATGA |
| 653 | CCGCGCTTAATGCGCCGCTAAGAATCAGATCGGAACATCCGCTC |
| 654 | CCAGAACAAACGGTACTGAGGCCAGCTCGAATGTCATACCCCCTGCAT |
| 655 | CCAAGCTTTCAGAGGTGGAGCCGCCATTTTTGGGAACGGATA |
| 656 | CAAGTTACTGCGGCCAGCGCGCCTGTGCACTCTTTAACAAAGCATGTA |
| 657 | GCAATAGCTATCTTACACCTCACCCGGAAATTTTTTTATTCATTAAA |
| 658 | AAGTATTAATTAGCGGTCGAGAGGGTTGATATGTGGTGC |
| 659 | CAGACGATCCAGCGCAAATTGCGTATGGTCATAGCTTACAAGCCCAA |
| 660 | GTACATAAATCAATATATGTGAGTGATTTTTTAACCTTG |
| 661 | AATGAGTGGAAGTTTCCTGTGTGCCTGAGAAACGTGCTT |
| 662 | CTTTCAACAATTTACCGTTTTTTTCAGTAAGCGTCATACATGG |
| 663 | AAGTGCCGGGTTTTGCTCAGTACCGCAATACTCTATCGGCATAATCAG |
| 664 | CAGTTGAGCCTGTCGTAGAGAGTTTACGAGCCCCGTGGTGGTTCCGAA |
| 665 | AAAATCGCGCAAGCAAATCAGTAAATTACCGCGCCCAATAGAAACCAA |
| 666 | GATGAATATGTAGCATGTCACCAGTACAAACTGCCACCCTCATTTCAA |
| 667 | AGAGCCGCAAGAGAAGGATTAGGAGAGGCTGATTTTCAGCGTAACAC |
| 668 | AAGGTAAATATTGTTTACCAGTCCATGAAATACGTCAAAAATGAAAAT |
| 669 | GAGATAAAGAAATTGCACGTATATAGGAACCTCGGAACC |
| 670 | TTTAGCACAACGCCTACAGTAACAGTAGAATTGTTTAA |
| 671 | ATTCACAAACCACCAGAACCATTTTTCACCAGAGCCGC |
| 672 | TTTGATTTTTAGCCTTAAATCATTATTTATTTTTCCCAATCCA |
| 673 | CCGATTTACTTCTGAATTTCTGCTCATTTGCCGCCAGC |
| 674 | TAACGAGCGTTAGATTTTGCACCTTTTTAGCTACAGAACGCGA |
| 675 | CGAAGCCCTTTTTATTTTTGAAAAGTAAGCAGATAGCCGA |
| 676 | GTAACGATAGCAAAATTATTTGCGCATTAGAAGAATAACGATAACCC |
| 677 | AGCGGATCAGGGAAGCACGTAAAACAGAACCCGTACTATGTAATCCTGTCAGATGA |
| 678 | ATCAAGAAGAATTACCTTTTTTAATGGAAACAACAAGAAAGCAAAAGA |
| 679 | CCCTCAGAACCGTCAGACTTTTTTTAGCGCG |
| 680 | GATACAGGAGTGTTTTGACGCTCACCTGATTAATTGTTTGGATCTGGCA |
| 681 | ATAATGGAAGGGTTACATCAATAGTTGCTTT |
| 682 | GGGATTTTGTTAGTAAATGAATTGAACCTACCATATACTAAAGAGACGCAGAAAC |
| 683 | TTTGGGGTCGAGGTGGGAAGCATACAATTCC |
| 684 | CTTCTGTAACAGAACGCGCCTGTTTTTTTATCAAC |
| 685 | AGGGCGAAAAACCGTCAGTTGGGCAAAGGAGC |
| 686 | GTCACCTTTTTACTTGAGACGTACAGCGCCATGA |
| 687 | ATCCCGTAGAAGATTTTTAAGCGGGTTGTGTACATCGAC |
| 688 | TTAGAAGTGCCATTGGTGAGGCGGTGCCTG |
| 689 | AGGAATACCGAACGAACCACCAGCCCACGCTGCACCTTGCTGAACCT |
| 690 | TCATATTATCGTCTGATTTTTATGGATTACAACAGGAAATTTTTACGCTCATGGA |
| 691 | AGAACCCTTTACATTGGCAGATACCAGAAGATCATTTTGCGGAACAATGCTGAT |
| 692 | CATCGCCATTAAACAAACTGATAGTGGCTATTAGTCTTTA |
| 693 | CAGCAGGCTTTTTAAAATCCTGTTTGATAAAGCCGGCGAACGTGG |
| 694 | TGGTCAGCAGCAACCGAGCACATCAATTTTAAAAGTTAACCACCACACCC |
| 695 | ACGTTATTCTCATAACTGCCGTTCAGGGTAAAGTTAAACGAGTTTGAG |
| 696 | AATCATACTGACCATTTTCTGCGAGCTTGCCC |
| 697 | GTTCAGCAAATCGTTAACTTTTTGCATCAGATGCCGGGTTACCTGCAGCC |
| 698 | GGTACCGACCGAGTAAAAGAGCAGTTGTTTTTAAGGAATTGA |
| 699 | TCCTCACTGTTCTTTTTTTGCGTCCGTGAGCCGGGTCACTGT |
| 700 | CCAACGGCAGCACCCCAGCCCGAGGAGTCCACTATTAAAG |
| 701 | GCTCATGCAAATAGATTTAAAGCATAGAGCCAGCAGCAAATGGGCGCGA |
| 702 | CTTATAAATCGCTGATTGCCCTTTTTTTACCGCCTGGCCCTG |
| 703 | TTTTAATGACAGTATCGGCCTCAGGAAGATAATATTC |
| 704 | CTAACGGAACAACATTATTACATTTCAACTTTAATCCAGCGATT |
| 705 | GCCAGCTGCATTAATGATTTTTTCGGCCAACGCGCGG |
| 706 | ATATTATTTTTCGCCAATTAGACTGGAAGGTTAATCCGCCTGCCCTGC |
| 707 | CCGATTATTTTTAGGGATTTCTAAACTTTTTGGAGGTTACAAAC |
| 708 | GAACTGACCAACTTTGCCGAATAACCTGTTTAGGTGGCATC |
| 709 | AGACAATATCTGGCCATAAGAATACAATAGAAACAACT |
| 710 | GCTATATTTTCATTTGCAATCATAAACGTAACAAAGCT |
| 711 | AGGTCTTTCAAAAGGATGTTTTAAAACAGTTGATTCCCAA |
| 712 | AAAAAAGCCGCACAGGCGGCCTTTAGTGATGACGGCAAAC |
| 713 | TGTTACTTGTCATTGCAGGCGCTTCAACCAGCTTGAGGATAACTCGTA |
| 714 | CTTTTGATGCTCAACACAGTTCAGTGACGAGAAACACCAGATTCATTA |
| 715 | AATCAATATCTGGTCAGTTGTTTTTCAAATACGCGTGC |
| 716 | AAAACGAGAATACGTCAGCGTGGTTAATTGCAGAGCCGT |
| 717 | AGATACATCCCAAATCAGGGAACCTTTGTATCATCGCCTGATAAATTG |
| 718 | TCAGCGGGAGCCGGAATCCGCGACCTGCTCCAAGGTTTCT |
| 719 | GAGGAAAGCCAGCTTTCCGCAATACACTATCATAACCCTCGT |
| 720 | GGAACGTGCCGGACTTGTAGAGACATTTTTGCGCGCATCGGATAGGTC |
| 721 | ATGCGCGAGGCAAAGAGTACCAAAATGCTGTAAAGAGGTCCATAAAT |
| 722 | TTGCTCGTGGCTGGTAATGGGTAACAAATATCTATCTTTA |
| 723 | TGTCGAAACGAGGCGCAGACGGTGAAAAATCATTTAGTT |
| 724 | AGTGTAGCGTTTTTTCACGCTGCTTTTTTCGTCTCGAGG |
| 725 | GGGACGACTAACCGTGCATCTGCCGTAGATGGGGATGGCTCACACGAC |
| 726 | CAGATGAAATACCAAGCGCGAAACAAAGTACAACGGAGA |
| 727 | ACCGCCTGCAACAGTGAGAAGATAGGAGCACTTAATACATTTACGGCT |
| 728 | TAAAAAAAACGTGGACTTTTTCCAACGTCAAATCGGCAAAATC |
| 729 | CAATCTGTCCATCACGTAGTAATAACTTTTTTCACTTCAG |
| 730 | AAACAGAGTTCTGACCTGAAAGCGACAGAGATTTAAATCCTTTGAGC |
| 731 | AAGAGCAACTGCGGAATCGTCATACGCACTCCGCCCGAAA |
| 732 | GGGCGCGGGGTTTGCGAGTGAGACGGGCAACAAAAAGAAT |
| 733 | TGCTGGTCGGAGGTGTCCATCAGTGAATAAGACGAGTAGTGAATATA |
| 734 | CATAAACATCCCTTACACTGGTGTGGAGAGGCTTGCGGTATGAGCC |
| 735 | AACATAAAAGGGACATTTTTTGAACCCTAAAACGTGGCAC |
| 736 | ACCCTGACTATTATAGTTTTTTAGAAGCCCACATTCATTTTTCTAA |
| 737 | TCAAAAGGATTCGCAGTAAACGCTCAGCAGAATCATAGAAGAGTCA |
| 738 | ATATGCTTTTTACTAAAGTACGGAGAGTACTTTTTTTTAATTGCTC |
| 739 | CTCCGGCTAACATAGCGATAGCTTAGATTAAGTTAATTGATTGAAAT |
| 740 | ATTCGCGTCTGGCAAACAGCTTGGCGGGATCGTCCCGTGTGATAAA |
| 741 | GGGCGATCGGTGCGGCGACAATGAACGCCATTCAGCTCAAAGCCTC |
| 742 | TCTTTGACCCCATTGTGAATTTTTTACCTTATGCGATAATAAAACGA |
| 743 | ACCGAACCTTAATATTTTGCCTGAAGATCTACAAAGGCTACGCCACCC |
| 744 | TCCTCATTAAAGCCCAGACGATCGGTCATAATCAAAATACCTAAAT |
| 745 | TTCTAGCTGAAGTAGTAGTTTTTATTAACATCCAATAGCTGAAAA |
| 746 | GTGAGAAAGGCCGTTGAGGCAGGTAGAATGGAAGCACCGTTACCATTA |
| 747 | ATAATTACCTTTCCAGAGCCTTTTGACATTCAACCGATTGAGGGAGG |
| 748 | CAAAATAAACAGCCATAAGATTAGTTGCTAAAACATGTTCAGCTAATG |
| 749 | ACGACGACTTAATTTCCCGGAATCTTTTCATCATCAAGTTTGCC |
| 750 | CGCCAGCATCAGAACCCCGCCTCCCTCAGAGCTTTTTAACTTAATGGT |
| 751 | AATCGGTTATTAGCAAAATTTTTTAAGCAATATTTTTTAAACAGGAAG |
| 752 | AAGAGAATAGCAAATATTCAACCGATGTGTAGGTAAAGATTGCAATGC |
| 753 | CAGTAATTATGACCCTGTAATTTTTTCTTTTGCGGGAGAGCATAAAGCT |
| 754 | GAAACCGAAAAAGGGCTGTCACAAGCGACAGAGGCATTTTTGGCCTTGA |
| 755 | AAAACTTTTTCAAATATAAATGCTTATTAATTAATTTTCCCTTAGAAT |
| 756 | GCTACAGAGGCTTTGACCGATATAAAGTTTTTTTTATTCCATAT |
| 757 | AACTGTCATGCCATTCGCCATTCAGGGGGGATGTGCTGCAAACGCCAGC |
| 758 | TCAGTTGTTTTTAGATTTCTACGTTTTTAAGAACTGGCTCACGAAAGAG |
| 759 | CGGTGTTTTTACAGACCAGGGCAAAAGAATACACTAAAACACTC |
| 760 | AAAACCAAAAGAAAAATAGGAATACTGGCTGACCTTCATTTTTTAAGAGTAATC |
| 761 | TCTGGTGCCGGAAACCATAATAGTAAAATGTTTCGACGATA |
| 762 | GCCAGTTAACAAAGTTACCAGAAGGGCCAGTGGGTGAATT |
| 763 | ACAAACGGCGGATTTTTTTACCGTAATGGTCGAGCTT |
| 764 | CGCATAGGGGACTAAAGCATGTCAATCATTTTTATGTACC |
| 765 | CTGAGGCTTGCAGGGAAACGAGGGATTGTATACGATGAAC |
| 766 | ATTCTACTAATTAAGGTAATCGTAAAACTAGACTTTTT |
| 767 | GTTAAAGGTTGTTAAACAAAAATACTGAGTAAGAAGCC |
| 768 | TTGCTTTCGAGGGTTGCAAGGCCCTAAAGGACGGAGTGA |
| 769 | CACCCTTCCTGTAGCGCTTCGGTTTATCAGC |
| 770 | TTCGCAAATGGTCGTTGATATTTTTTCAGAAAAGCCCCAAAA |
| 771 | GAGTCTGGAGCAAACTTTATCAACGAAAGACAGCATCGG |
| 772 | AATAAACAAAGCCTGTTTAGTATCTTAAATTT |
| 773 | TACCAGCGCCAAAAAACAGTCACGACGTTGTAAAACGAC |
| 774 | GTTATATACACGCCACCACCGGAAGCCACCCTCAGAGCC |
| 775 | ATTAATGCCGGAGAGGGTAGCTAATATGATATTTAAATT |
| 776 | AGCACCATAATCAGTATCAATAGATAAATAAGTATACAA |
| 777 | CAGCTTTCATCAAGGTCAGGATTACCAATAGGACAACAAC |
| 778 | TTGCCATCAGGGAGACAGTCAAATCACCATCATTTTTGAG |
| 779 | TTAAATTTCCGCTTTTATACCGATAGTTGCGCGCCTCTTC |
| 780 | TCTAAAGTTTTGTTTTGGGAATTAGATTTTTCCAGCAAAA |
| 781 | TACCAGAAGACTTTTTTGGATAGCGTCGCACCGC |
| 782 | ATTAGCGTTCGATAGCAAGAGAACCCTCATATATTTTAAA |
| 783 | ATAGTGAAGTAAAATACGTAATGCAGTTTCCATTAAACGG |
| 784 | TTGACAGGTTTTCATAGCCCCCTTTAAGGCGTAAATTCAT |
| 785 | ATCTTCTGCACCGGAACCAGACCTCAGAACCGCC |
| 786 | AGGAACAAGGAAACGTGATAAAAATTTTTCGCAGTCTCTG |
| 787 | AGTTTCAGATTGCGAATAATAATTTTTTCACCTCACCAGT |
| 788 | TTTATTTCCCGTGGGAGCGAGTAACAACCCGTGCCTTT |
| 789 | TGGTGTTTTTATTTTCATCGCGAGAACAGGGTGCCTCACCCAAA |
| 790 | TTTTCACGTCGTAATCTGCGCTCAAAAGCCTGAGCAAGCCGGTT |
| 791 | ATTGCTTTAGCATATAGAAGGCTTTATTAAACACAAGAATTGACAAT |
| 792 | AATTTTATCCTCCTTTTACATCGGACGCGAGGCCCATCCTCGGCTGTCGGCT |
| 793 | TTTGTTTCCTTATCATTCCATCAATAATAATTTACGTTTCATTT |
| 794 | TCCTGTTAAGCCGAGAATTAACTGAACACCCATCAGAGAATAAAAAC |
| 795 | TTTGGTAATTGAGCGCTAATTGAACAAATGAACCATAAACTTAA |
| 796 | GCCAGAATAAATTGTTCCTAAAGGTCAAGTTTCACTACGGTCAGAGGTTCT |
| 797 | AAAGAGGATTGACAAGATGGTTTAAGGTAGAGTAAAT |
| 798 | GAGAAAGGATCGCTGGCAGCCTTGGAACAAATAGGGTTGAGTGT |
| 799 | TTTGAGAACCGGATAACGAGTAAAGATTCATGCAGATA |
| 800 | CCACGCTGGTTTGCGTCGGTGGTGCCTTTTCACCTATTGGGCGCCAGT |
| 801 | CAAAGCGAATATCGCGCAAAAATCATTGAATCCCT |
| 802 | TCAGTTCCGGCCAGCAAGAATGAATTCGAC |
| 803 | TTTTTCATCCCACGTCGCACTCATCTAAAAAAACCCTCTATTAAC |
| 804 | TATGCTTTAAAATTACGAGGCATAGTCATAACGC |
| 805 | TAGCAACGCATGAGGACACTACGAAGGCACCAACCTAAAATTATACCAT |
| 806 | TACGTTGGGAATAGCGAACGCATAAAAAGCGGATTGTGGGAA |
| 807 | GTGTCTGGTTCGGTCGCATCGCCCGAGGCTTTTGT |
| 808 | TAAGTTTTGCCAGAGGGGGGGCAAAGCCAAAAAGATTA |
| 809 | TAGTAGGGCACGCTGAGGTCTGAGAGACTACCTCAGGTCA |
| 810 | TACATAACAACGCCAACCAGTATAAAGCCAACGT |
| 811 | TCAACATATAAAAGAAAATGTGAATTTCTTAATGAAACCATTGTTAAA |
| 812 | AATTGTAATTGGCGATTAAGTTGGGTAACGCCAGATACATAAT |
| 813 | AGTAATTATATAAAGTACCGACAGAATCGCCATATTAATT |
| 814 | AAAGGTAAATTCTTACATGTAATTTGGCATGATTAAAGT |
| 815 | TAGCAGAGAAAATACGGTTTTCCAAGGCTCCAAAAGGA |
| 816 | TCATCAGTAATAAGAGACTGTCCAGCCTTGAATAGGTTGG |
| 817 | ATGTTAGCCACCACGAAAAGAACTAGGCAGAGGCATTTTCGT |
| 818 | TCGGAATACCCGAATAAGTATATGCGTAATAAACA |
| 819 | CGCAAAGAAAACGTACTCCTTATTACGCAGTGGAAACGCAATAAAGTT |
| 820 | CTCAGGTTTTTGGTTTAGTACCGCACTATATGTATTTTAG |

H1 design oligo sequences (5′-3′)

| | |
|---|---|
| 821 | GCAGTAGAGTAGGTAGAGATTAGGCATGGCAATTTTCTGTATCTTTTGATGACTTAGC |
| 822 | GCAGTAGAGTAGGTAGAGATTAGGCAGGTGAAGGCCACGTCTTTCCAGACGCTAAACA |
| 823 | GCAGTAGAGTAGGTAGAGATTAGGCAGGGCGCTAGGGCGTATAGAGCTTGCGATGGCC |
| 824 | GCAGTAGAGTAGGTAGAGATTAGGCAACGTTGGTAAGAAACCTCACCAGTTAGCCCGA |
| 825 | GCAGTAGAGTAGGTAGAGATTAGGCAGCGGTCCGGCGTTGAGTAACATTGAGCGGAATTATC |
| 826 | GCAGTAGAGTAGGTAGAGATTAGGCAGACTTCAAACCAGACCTTTTTGAAGCAAACTCCAGCTGCGC |
| 827 | GCAGTAGAGTAGGTAGAGATTAGGCAGAATAGAACGGATTCTAACGCAAG |
| 828 | GCAGTAGAGTAGGTAGAGATTAGGCATGGCGAAAACACATTAAATGTGA |
| 829 | GCAGTAGAGTAGGTAGAGATTAGGCAATCACGTTGAAAATCTCCAAAGAC |

TABLE 6
Staple sequences used for the T3 triangle 2 folding.

SEQ ID NO:

Core structure oligo sequences (5′-3′)

| | |
|---|---|
| 830 | GTGCCCCCTGCCCGCTAGAGAGTTCCGGGGGTCCGTGGTGGTTCCGAA |
| 831 | AGAAAACAAAGAAGATGATGAAACCCCTGCCTGTACCAGGGATACAGAGCCAGA |
| 832 | GAGCAAAATTATTTGACGTATAATGATATAACTGAATTT |
| 833 | ACGGATTTCTTTGCTGCGGCTGGTAATGGGAAACATCAGAAAAATATGCTTTGA |
| 834 | GAATTATTAGTACCTTTTCAGGTTTAACATTGAAGCCT |
| 835 | TAGCAAGCAATAAAAGCCGTTTTTTTTTATTTTCTGCTGATGC |
| 836 | ATTTGAATTACCTTTTTTAATGGAAATTTTTAGTACATA |
| 837 | ACCCTCATAAATGGAAGGGTTAGAAATGAAAAAACGATTATTATTTA |
| 838 | GCACGCGAGCATTAATTGCGTTCCGGGCGAGCAAATCGTTAACGG |
| 839 | CGCGCTTAATGCGCCGCTACGAATCAGAATCGGAACCGGCGGGC |
| 840 | TGCGTAGAGCCACCCTACCGTACTCAGGAGGTAGCGGGGTTTACAAAA |
| 841 | ACATGTGGTGCTGCGGCTGAGAAGCGTGCTTT |
| 842 | TTTACATCACAGAAATCAAATAAGATAGCAGCTCTTACCA |
| 843 | TAAAAGAAACGGGGATGTGCTGCAACATAAAATAAATCAAGATTAGTT |
| 844 | CAGTACCTGGTGTATCCAGAACCGTCATTAACGCCACC |
| 845 | TACCGTAAAGCAAGCCCAATAGGATACTTCTGAATACGCACGGCCAGTGCCAAGC |
| 846 | ATCGTAGGAATCGTCAGATGAATAATCGGCTGGATAAGTCCTGAACAA |
| 847 | GCCATTCAGGCTGCGCAACTGTTGGGTTTTTAGGGCGATCGG |
| 848 | TTTCAGAGAACGTCAAAACCTACCATATCCCTACTATGGATCAGATGGGAATTAT |
| 849 | TGCCCGTACGGGGTCAGTGCCTTGCAATACTTTATCGGCCTAATCAGT |
| 850 | CATGAATTTTTGTATTAAGAGGCTTAACCTCCAAAGAACG |
| 851 | TCTTCGCTATTACGCCACGACGTTAGAGAATAAGGCGATT |
| 852 | CCGATTTAATATAATCGCCACGGGAACGGATAACCTCAC |
| 853 | AGGGCGAAAAACCGTCCGGAAACAAAGGAGCG |
| 854 | ATTGGCCTTGATATTCACAAACAACGCAGTCTGTATAGCTGCCGTC |
| 855 | TATCAGGGGGGGGAAAAGCACTAAGCGGGAGCAGACAGGA |
| 856 | CGATGGCCTTTGGGGTCGAGGTGTTCTGCCACGTTTTCA |
| 857 | ACAGGGAAGCGCATTATGCGGGCCAGACACTTTTTCACGGAATAAGT |
| 858 | CCCTCAGAACCGTTTGCCATCTTTTTTTTCATAATCAAAA |
| 859 | ATGGAAAGATAAATCCCCACCCTCAGAAAGCCACGTAAA |
| 860 | ACCGTCTGGTAATATCATACCTACCCTCGTTAAGGGCGCG |
| 861 | CAGAACAAACGGTACGGAGGCCACGCGCAGTGGTGTGTTCCGGTTGCG |
| 862 | GACGGGAGAATTAATTTTTTGAACACCCTGAACAAAGTCA |
| 863 | TCAATATTTTTAAAATTCAGCTGGCGAAAGGCAA |
| 864 | GACTTGCGCAAGAACGGGTATTAACTAATGCAGAACGCGC |
| 865 | ATACATGGAGTTTTAATAAACAGTTAATGCCTAAAGGTTCGCCTGAT |
| 866 | TAGAAGAACTCAAACCTTTGATTAAATTAACCGTTGTAGTTACACTG |
| 867 | CTGATTGTTTGGATTTCCTGATTTTGCTTTG |
| 868 | ACGCTAACGAGCGTCTACAGCCATTTTTGTTTCCGTGAGC |
| 869 | AATCAATATACAGTAAATACCAAGTTTGCTCAATTTCGGA |
| 870 | ACCAATTTTTGTACCGCACTCCGTTTTAGTTTTTGAACCTCCC |
| 871 | GGATTAGGATTGAGCCAGCTTTTTAAATCAC |
| 872 | CAACAATATCTTTCCTTATCATTCGGAGGTTTTACCGCGCCCA |
| 873 | TAGCCCCCACCTATTATTCTGAAATCAATTACTCGCGCAG |
| 874 | TTATTAGGAGTGTACTGGTAATACTTTTGATCGGATAAGCCGGAATA |
| 875 | AATCAATATCGACAATAAACAACTTTTTTGTTCAG |
| 876 | ATGTGAGTTTGGGTTATATTTTTTACTATATGTAAATATTCATT |
| 877 | TCAATCCGGCGCTCACTGCATCAGCGGTCATAGCAGCAAGCGG |
| 878 | GTATGAGCCGGGTCACGGATCCCCCGCCTGTGCACTCATAGAGAGGGT |
| 879 | TCGTCACCCCACCAGAGCCTTTTTCCGCCAGCATTGACAGGAG |
| 880 | AGGTCAGACGATTTTGACGCTCAAGAAGGAGCATGGCAATTCATGGCAA |
| 881 | CTGAGCAAAAATTAATTACATTTAACAATTTCCTGTTTATAGGCGAAT |
| 882 | CGGAAGCATAAAGTGTCATAGCTGACAGTTGATGTTGCCC |
| 883 | TCGTCATAAACATCCCAGTAACAGTGTTTTTATTGTCCAGTAAGCGTC |
| 884 | AACTGCATATAACAGTTTTCGCAAAAAAAGATGGTCTTTACAAAATA |
| 885 | AATAGGAATGTAGCCAGCTTTCATCAACATTGGCATAGT |
| 886 | AGACAATCTGGCCAAAAGAATACCTAACAACTATCTAACGGCCAGA |
| 887 | CTATTAGTCTTTGTGGCAC |
| 888 | CTGGAGGTGTCCAGCATCTTTTTGCGGGGTCATTGCAGGCGCTTTCGCAC |
| 889 | CCATCCCACGCAACCAGCTTACGGTAATGAATCAGCGTGGCCAGCG |
| 890 | CCACTACGAATACACTAAAACACGCCACGCTTAGAGAGT |
| 891 | TTGCTCCTCGCAGACGGACCCCCAATTAAACGGGTAAAATACGTAATG |
| 892 | ATCCTGTCCATCACGCAGTAATAACATTTTTCACTTGGAA |
| 893 | AGTACAACGGACTAAAGACTTTTTCATGAGGAAGTTTCC |
| 894 | CGATTAATTTTTGGGATTTTTAAACATTTTTGAGGCTTTGAGGA |
| 895 | GCGATTATACCAAGCGGTCCATTTTTGCGGATTAGCTCAAC |
| 896 | GGCTTAGAGCTTAATTTCATCTTTGTCAATCATAAGGG |
| 897 | TTCCAGTCGGGAAACCTTTTTTTCGTGCCAGCTGCAT |
| 898 | AGAGGCGGCGGTGGTGCAAGAATGCCAACGGCTCTAAAGCAGGAATTG |
| 899 | TTGCGGAACAAAGATTTTTACCACCATCGTCTGAA |
| 900 | CGCCATCAAAAATAATATTTTTGTATTATAGTACACGACC |
| 901 | AAAAATCATAAGAGGATTTACCAGGACAGATGAACGGTGTGAACGAGG |
| 902 | ACGAAAGAGCACATCCTCATAACGCCGTTTTTTTAGAGCCTATTAGAC |
| 903 | AACCGACTCAATATCTTGAGAGCCACACCGCCTGCAACAGTGCTGAATA |
| 904 | TAGAACGTCGGCCAACAGTGAGACGGGCAACAAAAAGAAT |
| 905 | ATTGCATCATGTAAAAGGGACATTATTTTTGAATGG |
| 906 | AAGTTTCAACCTTTAATCCAACAGTGAAAGAG |
| 907 | TTCATAGCCCTAAAACATCGCCATAGTATTAAGCAGCAAATGAAAAA |
| 908 | CCGAACGATCTGACCTGAAAGCGTCAGAGATATTTACAAACAATAAG |
| 909 | CGAGTAGTAAATTGGGCTTGATCAAGAGTAATCTTGGGCTTTGA |
| 910 | AAACGATGCTGATCCCAGCCCGAGGAGTCCACTATTAAAG |
| 911 | ACGATCCACGAGTAAAAGAGTAATATCTTTTTGGTCAGTTGG |
| 912 | CTTATAAATCGCTGATTGCCCTTTTTTTACCGCCTGGCCCTG |
| 913 | CAGCAGGCTTTTTAAAATCCTGTTTGATAAGCCGGCGAACGTGGC |
| 914 | GTGCCGGCCGGGTTTTTTTCCTGCAGTGCTGGTCTGGTCAGC |
| 915 | GCTGAACCTCAAATATCAAATTTTTCCTCACATCAGAT |
| 916 | TCGTCTCGCCTTTAGTGATGAAGGTTGGGCGGATTAAATCCTTTGAACCACCACACCCG |
| 917 | TGGATTATAACAGGAAAATTTTTCGCTCATGGAA |
| 918 | CCACGCTGGTTTGTGCCGTTCCGGCATTTTCACCGCGCGGGG |
| 919 | ATCACCTTGATAAAACAGAGGTGAGGCGGTCTAAAAATAAGGAAGGTTAATAGA |
| 920 | TATTACTTTTTGCCAGATAATACACAAATCAACGGACTTGAGCAACCG |
| 921 | CGCCATGAACGTGGACTTTTTCCAACGTCAAATCGGCAAAATC |
| 922 | ACGACGATAAAAAAAAAAGCCGCCAAAGCGGTAGGAGCAAATGCGCG |
| 923 | GAACCCTTTACATTGGCAGATTTATCATTAATTTTAAAAGTTTGCTCACGGA |
| 924 | ACAGGCGGTCGCTGGCAGCACTGACCAACTTGTCAGGAT |
| 925 | TCCCGGAATTTGTGAGAGATAGACTTTCTCCGCGCAGAAA |
| 926 | GTGTAGCGGTTTTTCACGCTGCGCAAACTTAAATTTGGG |
| 927 | TTGTGTACAAAAGAGATGGTGAAGGGATAGCTTCGCGTCTGGCCTTCC |
| 928 | GTCAATAGCCATTGCACCACCAGCACCTGA |
| 929 | TTTACCAGAAGAATTTTTAGCGAATCGGCGAAACGTACA |
| 930 | CTTTTGCATACCAGTCAGCCCGAACAGACCGGAAGCAAAC |
| 931 | AAAATCTACCAAAAGGAATTACGAAAATGTGATACTGCGG |
| 932 | GCGAGTAACAACCTAACGCGTTAATAAAACGAACTA |
| 933 | ATCGACATAAAAAAATCCCGTAACCCCTGACTTAAATCAGTTAAAATT |
| 934 | ACTTTAATTTTTTCATTCTGACGAGCCAAATCAACGTAACAGCAGCGAA |
| 935 | GCGCATCGTAACCGTAATTGCGACGATGAACAGAGTCTGGAGTAGA |
| 936 | AAAGAAGTTTTGCCAGATTTTTGGGGTACCTTATGCGTTTTTTTTT |
| 937 | TTTAATTCAAAAAGGCTTTTTCACGTTGAAAAATAGTAAAATGAGATGG |
| 938 | CGATTGAGCAGTATGTCTTTCCAGCTGGTGCCGGAAACCAGGCAAAG |
| 939 | ACCAGAGCCATCGATAGGCCGGAATGGTTTGA |
| 940 | GCTTAGATCAGGGAGTTAAAGGCCCGGTCGCTGAGGCTTG |
| 941 | CTTTTTCAGTAATCAGTAGCGACTCCTCAAGAGA |
| 942 | AATCCAATCGCAAGACGGCTTAGGGAATAACCTTGCTTCTGTAAATCG |
| 943 | ATCAGGTCCGGTTTATAAGGAACAACTAAAGGGCATCTGC |
| 944 | GTAAACGTTTTTTAATATTTTGCTCATTTTTTATATTCATTGAATC |
| 945 | TCTCCGTGGGAACAAACAGGAATACCACATTCAACATTATT |
| 946 | AACAGTACGGGAGGGAAGACAGCCCCTACAACG |
| 947 | CATTCAACATCACCGTATGATTAAAATACCGAGAAAAAG |
| 948 | AGTACAAATCATAGTTAGCGTAACGATCTCAAAAGGGCGA |
| 949 | AGTAAGTCAATAACCTGTTTATTTTTCTATATTTTCTTTAGTTTGACCA |
| 950 | GCGCGAGCGCAAATATCCAAAAACAGGAAGATTTTCT |
| 951 | TAATATCAGTAGAAAAGAACTGGCCACCGACTCCATTACCAGAGCCGCC |
| 952 | GAGCCACCACCCTTGGTTTACCAGCGTTTTTCAAAGACAA |
| 953 | TCACCGGACGTTTTCATGCCTTTAGCGTCAGAATCAAAATTTAGTTAA |
| 954 | TAGATACATGATTCCCAATTTTTTCTGCGAACGAGCAAACCCGTTCTA |
| 955 | TTCTAAGAACGCGAGGATCGAGAACAAGCGAAAATTCTGTCCAGACGA |
| 956 | TAAAACTAGCATACGAGAATAGACAGCTTGCTTTACCTAAATTTAA |
| 957 | TACCCCGGTTGATACAGTTCAGAAAAGAGAATATAATAAT |
| 958 | TCCAAAAGGAGCCTTTACCGATAGGCTGATAAAATGTGTA |
| 959 | AATTGTATATTGCCTGGGTAATCGAATCATAATTTGGG |
| 960 | GCGTTAAAATCAGATATAGAAAAATACATACATAAAGGTGGCAACAT |
| 961 | AGACTTTTTTTAAATATCGCGTAACGAGAATTTTTGACCATAAATC |
| 962 | CGGAACAACTAATTTTTTGCAGATACACGTCGGA |
| 963 | TTAGCAAAAAAGGCTGTAGCTAGGTGAATTTGAGAAGATAGCGATA |
| 964 | CATTATGACCTGCAACTATTTTTAGTACGGTGTCTGGTAATGCTG |
| 965 | ACGTCACCTCATTAAACGCACTAATAGTAGTAGCATTAAC |
| 966 | GGTAAAGTTAAACACCGGAATCATCCAGGCTT |
| 967 | CGACAAAACGAGAAAATAAATAAGCAGTAGCATGAGCCATTTGG |
| 968 | ACAATGACAACAACCATCTCCAAAGAGCTTTTTTTAAAGCGAAC |
| 969 | TGTTTTAAATACTGGGTAAAGATTCAAAAGGCATAACC |
| 970 | TTCTGCGATTTTTGAGCCCTCATAACGCAAGGATAAAAATCTGTAGCG |
| 971 | TCAGAGCCACCACCCCTCCCTCATTAGCAAGCAGCACCAATATATT |
| 972 | ATCCGGTAGAGGGTAATTGAGCGCCGCCATTCTTATTTTG |
| 973 | CATAGGTCTAATTAATTTTCCCTTAGAATCCTGTATAAAGTTTCATC |
| 974 | GCCTGATATCGCCCACGGTGAGAAAGGCTTTTTGGAGACA |
| 975 | TGGGATAGTATCGGCCTCAGGAAGGAGGGGAC |
| 976 | ATTCCACAGGTAAATATGGCATCAATTCTCACCAGAACCA |
| 977 | TAATACTTTTGCGGGAGAAGCCTTCGGTTGTCGGAGAGG |
| 978 | GTATGGGTTTATCGCACTCCAGCCAGCTTTCCGGGTTAAGCCACTTTC |
| 979 | ACGGCTACAGAACAAGAACTTTTTGGATATTCATTACAAACACCAGA |
| 980 | GGAGATTTTTTTGTATCATCAGACAGCATCGGAACGAGGGTAGC |
| 981 | ACAGGTAGGGCTTGCCGTGAATTAAATTGTGTCGAAATCTTTTTGCGACCTGCT |
| 982 | GAAATTATAGATCTACATTAAGCAATAAACACCGGAACCGCTCAGAGCGGTGAATT |
| 983 | TACCTTTTGAGACAGAATCAAGTTTCGGCATTTTCGGTC |
| 984 | AATGAAACCACGCCTCAGAGCATAAAGCTAAATTATTTCA |
| 985 | TTTGATAAGAGGTAAATCACTTTTTATCAATATGATATTCAA |
| 986 | CCCTCAAATGCTTGTCACGTTGGTGTTTTGACCGTAA |
| 987 | GCCTGAGTATTAATGCACCAAAAACAGGCAAGGCAAAGAAATCCAATA |
| 988 | TATTTTAAATGCAATTAAGACGCTCTTAAACAGCTTGAT |
| 989 | ATATCCCATCCTACTCTTTCCTGTGTGAAATTGTTATCCGCTCACCTGT |
| 990 | TGCCAATTCCACACAACTAGAAACCGCTATTTTAAAGAAATAAGTTGGG |
| 991 | GGGAGAACTCATTTACGAGCATGATACGAGCTCCCAATCGCACCCAGCTACAACTT |
| 992 | TTAGATTTTATCCTGAACTTTACAGGTAAAACGCAGGGTTT |
| 993 | TTTTTAACTCACTCGAATTCGTAATCATGGTAAAGCCTGCTTCGCGTCACCCAAA |
| 994 | TCACTGCGGGGTACCGTGCCTGTTGGGTGCCTAATGAGTGAGCTCAT |
| 995 | TTTGGCCAGTTACAAAATAATTCCAGAGTGAACCATGTGGAGCC |
| 996 | CCAGAATCCCAGAATGCCTAAAGGTCAAGTTTCACTACGCCTAATTTTTCT |
| 997 | TCTTGGCTGGCTCTTAGCCGACAGACCATAATTTCAAAGAACTG |
| 998 | CGAAACAACCATGTTAGACCTTCAGATGGTTGGCGCATATCCT |
| 999 | TGAGATCATAACCCTCGAGGACGTTGGGAAGAGCTCATTA |
| 1000 | GGCAAAAGAAGGCACCAACCTAAAAGCACCGTTTTGCGTATTGAAGT |
| 1001 | TAACGGCGCCAGGGTGGTTTTTCAACGCGGTGAACGTGCCAGTTGAA |
| 1002 | AGAAAGGAACTGCTCATTTGCCTGGAACAAATAGGGTTGAGTGTTGACCT |
| 1003 | TAACTTCCAGTTGCCAGCAGGTAAAGTTTTTAGAAG |
| 1004 | TGTCTGTAATTTAGGCATAAAGTACTCGCTATTGAGAGAC |
| 1005 | GAGAGATAATAATAACCAGAAGGCCATATTTAACAACGCCAACAAGGT |
| 1006 | TCAATTACGGAATACAATTACTACCGTGTGA |
| 1007 | GACTCCTTGAAACGCAACCCACAAGCAGATAGCCGAACAAAGAAGT |
| 1008 | GAGAATAGAGGCATTTTCGAGCCCCAACGCTCAACAAACT |
| 1009 | TCTCGTAGGGCTTAATTGTATCATATGCGTTATT |
| 1010 | AGTAATAACCTGTTTAGAGAATCGAAACCGAGTACCGAAGCCCTTTGGT |
| 1011 | TAGGTTTAAGAAAAGTAAGAATTGACACCGCTTACGTTAGTAAATGAA |
| 1012 | TTCTTACCATGAAAACAGTCAATAGTGAATTTTTTTAGAA |
| 1013 | TAAACAATGAAATAGCAATAGCTATCTATTTTCAGCGGAGTG |
| 1014 | TTGGTCAATCATATGCAGATTTTGCTAAACACAATAATAAGT |
| 1015 | TTGCGCCGGATATATTGCTTTTGCGGGATCGTCACCCTCAAAGCTGCTT |
| 1016 | TAGCTCAGTGAATAAAAAGATTCATCTAAT |
| 1017 | TTGAGATTTGGCGGATTAGACTGGATAGTTTTTGTCCAA |

H1 design oligo sequences (5′-3′)

| | |
|---|---|
| 1018 | GCAGTAGAGTAGGTAGAGATTAGGCACATCATATAACCCATGGTTGAGGCACGCCGCC |
| 1019 | GCAGTAGAGTAGGTAGAGATTAGGCATCCCAGTCATACATTTTCAGGGATCACTGAGT |
| 1020 | GCAGTAGAGTAGGTAGAGATTAGGCAGGCGCTAGGGCGCTCAGAGCTTGA |
| 1021 | GCAGTAGAGTAGGTAGAGATTAGGCACGCATTAAAGTAACATCACCAGTCCAGTCGACAACTCGT |
| 1022 | GCAGTAGAGTAGGTAGAGATTAGGCACAGCGGATCGTCCCGAACGTTATT |
| 1023 | GCAGTAGAGTAGGTAGAGATTAGGCAAATCGTCATAAAACCGCGAGAGGAAGAGCAACACT |
| 1024 | GCAGTAGAGTAGGTAGAGATTAGGCACCTGTAGCTTGTATAATGAAAAGG |
| 1025 | GCAGTAGAGTAGGTAGAGATTAGGCAGACGACAGTAAAATCAGAAAAGCCTTAAATT |
| 1026 | GCAGTAGAGTAGGTAGAGATTAGGCATCAAAAGTTTTGTCGTTAGCAAAC |

TABLE 7
Staple sequences used for the T3 triangle 3 folding.

SEQ ID NO:

Core structure oligo sequences (5′-3′)

| | |
|---|---|
| 1027 | AAAATCCTGTTTGAAACAGTGTAGCGGTCACG |
| 1028 | AACAAAATTTTCAATTTTTCAGGGACACTGAGATGATACAGGAGGT |
| 1029 | ATCAAGAAACGCGAGGCGTTTGCTATCCGGTATTCTAAGAGCACTCAT |
| 1030 | GCGCATCGGGAGAAATTTTAGACACCCTCAGTGAGTAAC |
| 1031 | TTCCCTTAGAATCCTTGAAAACATAGTTTTTGATAGCTT |
| 1032 | ATCAATATATGTGAGTTTTGCTCACACCCTCATTTCGGAA |
| 1033 | TTGAATACGTACCGTAATAGCAAGCCCAATAGGGAGGTTTTTTAACAA |
| 1034 | AAACAAACGTTTTCACGCTGCGGCCAGAATGCGAATAACCCAAGTACC |
| 1035 | AGAAGGATATTAAGAGGCTGAGACGCTGGTAACATGGAAATTCTTTGA |
| 1036 | CACCGTACTCAGCAGCACCTTTTTTAATCAG |
| 1037 | TCGATAGAACCCATCAAGTTACAAAATTGCAATAACAT |
| 1038 | GGAGCGGGAAGAAATTCAGTTGGGCGGTTGTGTACATCG |
| 1039 | GCCACGGGAACGGATAACCTCACCGGTTTTTAACAATCGGCG |
| 1040 | AAACAGCCATAACCTAACGAGCGTTTTTCTTTCCGTTTGAAAT |
| 1041 | CGCCTGTAGCATTATTATTCATTAAATTTTTGTGAATTAT |
| 1042 | AAAAGAAGTGCTAGCGAACCTCCCATTACCGCGCCCAATAGCAGGT |
| 1043 | CCGGGGGTTCCTCAAGAGCAATACTACCCGTATAAACAGT |
| 1044 | GCGTAGATTTTCAGGTCAAAATTGCCGATTA |
| 1045 | TTCTGCCATTCCTGTGGTCGGGAATGAGCTAACTCACATTCACCCAAA |
| 1046 | GGTAAATTTTTATTGACGGTCCCGGAATTTGCAA |
| 1047 | ACCTGAGCGATTCGCCGGAGAATTTTGAGCGCTAATATCAACAGCGGATCTCACGG |
| 1048 | AGACGTTACAAATAAATCCTTTTTCATTAAAGCCAGAATGGAA |
| 1049 | CTCTGAATTTACCATAAAAGGGACATGGAAGGGTAAAACAGAAGGGCGC |
| 1050 | GTAGTTCCAGTAAGCGTCATACATTAAGTTTTAGCCACCACCCTCA |
| 1051 | GCTCATTTCAAAGTCACAGTACCTTTTAAAAAACAGGAGATTTGCACGTTAGAAC |
| 1052 | AGCGCCATGTTTACCAACGCAGAAGAGAGATATTCTCCGT |
| 1053 | AGCATTGACCACCCTCAGAACTTTTTGCCACCCTCAGA |
| 1054 | AGGAGTGTACTGGTAAGGCTTTTGTTTCGTCACCAGGGACAATAACG |
| 1055 | AGTGCCTACATTTTGACACGACCATACGCCAGGGGAGCTA |
| 1056 | AGCGCCAAAGATGAGAGATAGACTACCCACAAAAAAACAGGGAAGCGC |
| 1057 | AGGGCGAAAAACCGTCACATAAAACGCGCTTA |
| 1058 | TATCAGGGCGCTGGCAGTGGCGAGGAAGTGTTAGAGTCTG |
| 1059 | CGATGGCCTGACGGGGAAAGCCGGGGGTGCCCCGGAAGC |
| 1060 | GAATTGAGTTAAGCCCAAACGTACAAGGGCTTTTTGACATTCAACCG |
| 1061 | AATAATAAGAGCAATTTTTAAACAATGAAATAGCAATAGC |
| 1062 | CGCTCAATTCCATCACTTAGTAATATAGCTGTGCACGCGTCAGTGTCA |
| 1063 | TAATGCCCATGAAAGTTAGGATTAGCGGGGTGGCGGGCC |
| 1064 | AACAGGAAAAACGCTTATCCAGATCAAACTATCGGCCTT |
| 1065 | TTCCTCGTTAGAATCAGAGCAATCCTGAAAAGGAAGCATACGAG |
| 1066 | CTCCCTCACGGATAAGTGCCGTCGTGGAAACATTTCATTT |
| 1067 | GAGCCGCCCTATTATTCTGAAACCCTGCCTAGAACCGCCACCCTCAT |
| 1068 | TAATGAGACCTGTCGTGCCAGCTCCAGCGGCCTGTTCTTCGCGTC |
| 1069 | TAGGAATCGACTTGCGATTAGACGTGATTGCTGGTGAAGG |
| 1070 | ACCCTGAAAATTGCGTATGCCGCTCACAATTACCGTTGTAGGAACGG |
| 1071 | CAGCCTTTGCTATTTTGCACCCAGTCAATAATCGGCTGTC |
| 1072 | AGTTTTGTTCATAGTTAGCGTAATTTAACGTCAGATAGCTCAAACTTAAATTTCT |
| 1073 | GTACATAAGTAAATCGTCGCTATTAATTAATTTTTCCTTAGAATTACC |
| 1074 | TGAATCGGAGAGAGTTTAAAGCCTGCGTGGTGGTTCCGAA |
| 1075 | TCAGACGATGCATTAAATTCGTAAATAAAGTGGCAGCAAGCGG |
| 1076 | GGAGGTTTATTATTCATAATTACAAGTACCGCGTACCAGG |
| 1077 | CTACATTTTTATTTTATCCTGCGTCAAAATTTTTTGAAAATAG |
| 1078 | AGATTAAGATTTACGAGCATGTATTTTTAAACCAA |
| 1079 | CGCTGAGATCATCTTCTGATTTTTCTAAATTTAATGTTTTTTAA |
| 1080 | CTGCGCGCCTGTGCACGCTTTCCATGAAATTGTTATATGGAACCGCC |
| 1081 | TCATTCCATAAATCAAGATTAGTTACAGAGAGCAGTTACAAAA |
| 1082 | CGTCAGCGTGGTGCTGGTCTGGAAGGAAGCAAGCGCATCGGATAGGTC |
| 1083 | CTGCGAACGAGTAGATGCGACCTGTCAAGAGTAATCTT |
| 1084 | GTTTGGATTATACTTTTTTCTGAATAATTCTGGCC |
| 1085 | GACAAGCGCTTCGACAACAACAGTTTCAATATCTGGTCAGTTTAGTTTG |
| 1086 | TTTGGGGCGTGTCTGGTTTTAAATATTACCCA |
| 1087 | GTACTATGGTTTTTTGCTTTGACGCCTCCGGCCAGACCA |
| 1088 | GCGCAACAGTGCCACGCTGAGAGCACCCTCAAGAAAGGAATTGAGGA |
| 1089 | TTTCGCACCCTGATAAGTACAACGGAGATTTGCATCCCTT |
| 1090 | TGCCATCCCACGCCCCAGCCCGAGGAGTCCACTATTAAAG |
| 1091 | CAAAGCGATCCTTTTGATCGTCATAATCAACGTAACAAAGGGCTGGCT |
| 1092 | TCAGATGCCGGGTTACCTTTTTTCAGCCAGCGGTGCCGGTGCCCCCTGCA |
| 1093 | AAATATTCATTGTCAGCAGCAACGGATTAGACTCGTATT |
| 1094 | GTGTTCAGCAAATCGTTAACGGCAGCGCCAGGGTTGCCCTTCCCCG |
| 1095 | CCACGCTGGTTTGAACCAGCTTACGGCTGGAGGTGGTTGCGG |
| 1096 | ACACTGGTCTTTGCTCGTCATAAAAGGTTATCGAAGTATT |
| 1097 | CTTATAAATCGCTGATTGCCCTTTTTTTACCGCCTGGCCCTG |
| 1098 | CGCAAGAAGTCATTGCAGGAACCGGATATTCATGCAACTGAGTACCT |
| 1099 | GAAACAAAATTGTGTCGAAATCCTGGCAAATAAAGTACG |
| 1100 | GCAGCACCTGCCGGACTTATCATCATATTCACGTATAACGTGC |
| 1101 | TGAACGGTGTCGGTCAATGCAAAAGAATACACTAAAACACTC |
| 1102 | TAAAAATATTTGAATGCCTAAAACAAATCCTCAAACAA |
| 1103 | CCAACGCGCGGGGAGAGTTTTTCGGTTTGCGTATTGG |
| 1104 | AAAACAGATGAAAAGGCAGGCAAGTTAATTGCACCAGACCTCCCCCT |
| 1105 | TATCATCGTCAATCCGCCGGGCGCGTCCAGCAACGTTATTGCGGAACA |
| 1106 | AGAGGGTTTTTTGATATAAGTATATATATTTTTAAGGCGT |
| 1107 | TTAAACAGACTGCGGAATAAGAGGGCTGTAGCTCAACATG |
| 1108 | TTATGAGTAGAAGAACACAATATTACTTTTTGCCAGCTCA |
| 1109 | AACTTTTTTATAGACGTGAGCCGAGCTCGA |
| 1110 | AAATCTACGTTAATAAAACGATAAATTGGGCTTGAGACGAAAGAG |
| 1111 | TATTATCTGGTGCCGGAAATTGCCAGATACATAACGCCAAAA |
| 1112 | TTAGTGATGAAGGGTAAAGTTAAACGATGCTGCGTCTCGT |
| 1113 | AATTTTAAATTATTTATCTAAAGCACATTG |
| 1114 | CAGCAGCAAGACTTTATTGCCCGATCAGCGGGTGCCAACG |
| 1115 | AATGAAAATGCGCGAACTGATAGCGCTATTAGAAGAAACCACCATCA |
| 1116 | AGGATTTATAAAATATCCTTGCTGAACCTCAAATATCAA |
| 1117 | AAGTTTCAGACCTTCACTCCATGTACCCCCAGCGATTATACCAAGCGC |
| 1118 | TTAACACCGCCTGAGCGGTGAGGCACCACCAGCAGAAGAT |
| 1119 | CGTCTGTTTTTAATGGAAGTTTGATACATTTGTATGAGCCAAAGGTTT |
| 1120 | GGTACCTCCTCACATTTTTTTGAGGAGCGGCTGG |
| 1121 | GAGGCCATTTTTCGAGTAAATTTATATTTTTTCAGTGTAACATT |
| 1122 | ACAGAGATACATTGGCAGTTTTTTTCACCAGTCA |
| 1123 | GGCGGCCTCCACATTTTTCCCGCAAATCCCGTAAAAAAA |
| 1124 | TTGTAGAACGTTTTTTATTGCCGTTCCGGCAAATCGGCCTCAGGAAGA |
| 1125 | CCGCACAAACGTGGACTTTTTCCAACGTCAAATCGGCAAAATC |
| 1126 | GCACACAGACAATATTCCGAACGAGGTCAGTAATCGCCAT |
| 1127 | TCTTTAAAGAACCCTTCTGACCCCTGATTTGATGGCAATTCATCACGCGGTC |
| 1128 | ACACCAGAGGCGCATACTGCTCATGAACAACATAGGAATACCACAAAT |
| 1129 | TCATGGTCAACATCACTTGCCGAGCCGTTTTTCAATAGATAA |
| 1130 | AGGGGACGACGACAGTGTAGATGGACTCCAACTAAGAATA |
| 1131 | GAATAAGTAACTAAAGCGGCCAGTGCCAAGCTTTCAGAG |
| 1132 | TCATTTTTTTTTGCGGATGGCTTCGCGTTTTTTTTAATTCGAGCTT |
| 1133 | CCAACCTAAAATGGTTTAATTTTTTTCAACTTTAATCGTTGGGAAGA |
| 1134 | AAGAGGAAGCCCGCGATCGGTGCGGGGGTCAACTGTT |
| 1135 | GCTCCAACGGGGAATTAACAACTTTATTTTCT |
| 1136 | CCGACTTGAAGGCCGGAAAGAAACTACAAATTTTTAACA |
| 1137 | GGGAAGGGTAAGTTGGGTAACGCCTGTGCTGC |
| 1138 | CAGCTTTCATCAAGACTTCAAATACCAATAGGTGAATTTC |
| 1139 | GTAAATGACAACAGTTTCAGCGGAGTGAGGAACACCGTCA |
| 1140 | CGTGGAAGAATTAGCAAAATTTTTTTAGCAATAAAGCATTAACATCCAA |
| 1141 | GCGGATTGTTTTTCCGTAATGGTAACCGTGCATGCATCAAAAAGAT |
| 1142 | AAATCATATGGCATCAATTTTTTTTACTAATATTTTTTAAACAGGAAG |
| 1143 | CACCATTATTGCATTATGACCCTGTATTTTAATCAAAAGGTTTTAGAA |
| 1144 | ACCAGTAGTTGTTAAAGTGAGAAAGGCCGCCAGTAAAGATATGCAATGCCTGAGTA |
| 1145 | GAGGCAGGTCAGACACCACCAGTTTGCCTTTTTTCGGTCCGGAATC |
| 1146 | GCATAAAGCCGTGGGAGCGAGTAACAACCCGTATTTTT |
| 1147 | TTAAATTTATAACCGACGGTTTATCAGCTTGCTGGCGAAA |
| 1148 | TTATATAATTGAGGACTAAAGACTAACGGCTACAGAGGCT |
| 1149 | TTTTTAAGTCACAATCAACATATAAAACGTCAGAATCAAGAGCCGCCGC |
| 1150 | TCCTGAACTAAATAAGTATAAAGCTAGCGACACCAATGAAACCA |
| 1151 | ACGATTTTTTGTTTAAAATCTTACCAACGAGTTAATATCCCATCCTAA |
| 1152 | TTCCATATAACAGGTTGATATTTTTTCAGAAAAGCCCCAAAA |
| 1153 | ATAAGAATATCTTACCGAAGCCCGTGGAGCCATTGAGGG |
| 1154 | AAGAAAAAAGGGCTTAATTGAGAAGGTATCCAA |
| 1155 | TTCTAGCTGATAACCTGTTTTTTTAGCTATATTTTCAACCATTAG |
| 1156 | TTTGCTAAGAGCCAGCGTTGTACCAAAAAATATTCACAAA |
| 1157 | TCAGGTCACGCGTTTTCCGGAGACAGTCAAATCACCATCATTTTTGAG |
| 1158 | GAGTCTGGAGCAAACCTATATGTCAGGGAGTTAAAGGCC |
| 1159 | AATGACAACAACCATCGCTTTTGCATTGTATACGATGAAC |
| 1160 | TTATTACTTTTTAGGTAGTCAGGACATTGTGAATTACCTTAACGGGTAA |
| 1161 | GCCCACGCTTGTTAAACAAAAATAGAAGCCTCCTCAGA |
| 1162 | CAACGCTCATTATTTATCCCAGGCAATAGAAAATTCATATGGTTTAC |
| 1163 | AAACCTTCCTGTAGCGGGGAAAATCTCCAAAAAAAAG |
| 1164 | AGCGCCATTCGCCATTCAAAATAGCGAGAGGCTGAGGCATA |
| 1165 | GCCTTAGCGTTTGCCACCACCACCGGAACCG |
| 1166 | CCCTCATATAATACTTATAAAAAT |
| 1167 | CACCCTCAGCAGCGAACGATAGTTAATTGCTTTTTGAATATAAT |
| 1168 | ATGTGTAGCCAGAACCGATTGGCCCCATTAGCAGCCATTT |
| 1169 | AGCCTGCTTTAATATTTTGCCTGAAGATCTACAAAGGCTAATCACCGG |
| 1170 | AATAAACACATAGCCCCCTTACGGAATAGGTGTA |
| 1171 | CCGACCGTGTGATAAAAGTTAATTAGAGTCAATAGTGAATTTATCAAA |
| 1172 | AAGAGAATAGCAAATATTCAACCGTTATTTCAACGCAAGGTTGCGGGA |
| 1173 | AGAACGCGGTCTGAGAGACTACCTTTTTAACCTACCGACATAGAAAA |
| 1174 | CGCTATTACGCCAGCTTTCGAGGAACGCCATTCAGCTCAGTAGTAG |
| 1175 | TTCAGAAAACGAGAATGTTTTTCCATAACATCAGTTGTTTTTGATT |
| 1176 | ATTAATGCCGGAGAGGGTAGCTAATATGATATTTAAATT |
| 1177 | CATAATTTTTGGAACCGAACAATACGTAATGCCACTACGAAGGC |
| 1178 | TGACCAACAGACAGCAGCATGTCAATCATTTTTATGTACCGGCGCAGA |
| 1179 | GTAAGAGCTTATACCAGAAAGATTTTTGAAAGAGGACAG |
| 1180 | CAAATGGTCAATAAGGTAATCGTAAAACTATCGGAACG |
| 1181 | GAATTACTTTGCTTTTTAAAAGAAGTTCCAGGCA |
| 1182 | ATTCGCAGTAAACGGAGGCTTGAAATGCTGAGGTTGGG |
| 1183 | GCCACCACAACCAGAGTCTTTTCATAATCAAACAAGACAAATAATTAC |
| 1184 | CCTCAGAGCATCGGCATAGCGTCAATGCGTTAGCAAAGAC |
| 1185 | AGAGCCTAATTCGCGCAGAGGCGATGAAGCCTAGAACGGGAGCAAGCCAGGT |
| 1186 | TCATGTTTTTATTTTCATCGCGAGAACATATTAAACTTGCTTCT |
| 1187 | ACTACAAGATGAATATACAGTAAGAGGGTAAAACTGAACCGAGGTGCTCGT |
| 1188 | TCCCCGTAAAGCACTAAATCTTTGGAGCAAATCAGGGCT |
| 1189 | TTTGATATAGAAGGCTTCACTGCCCTCTGTGGTGGTCATA |
| 1190 | TTTGCCCCCGATTCAAGTTTGGAACCCTTGAACCATGCCGCCAG |
| 1191 | GCAAATTACCACACAAGGAAGAAATTAGAGCTCACTACGAAAGGGAGTTCT |
| 1192 | TACGAGAAATCTTTGTACTTAGCCGGAACGACCGTTGATTCCCAATTATACATTTC |
| 1193 | ACAGACCAACGAGTAGACTAACGTCAGTGAATAAGGCTTT |
| 1194 | TGGATAGCGTCCTTCAACTAATGCAGAGGGGGTAATAGTACCGCTTAGTCAGA |
| 1195 | CCAGTTTGTCGCACTCCAGCCAGCTTTCCGGCAAAATGTTT |
| 1196 | CTTTAGGAGCACTAACTAATGGGTGGGTCACTGTGGTTTTTCT |
| 1197 | TCCAGTGAGACGGGCAACAAAAAGAATCAGCAGGC |
| 1198 | TGCGCGTAAGCACATCCTCATATGGAACAAATAGGGTTGAGTGT |
| 1199 | TCAGTTACGGAACGGTCGGTGGATCATTTT |
| 1200 | GGGATCGTAGGGTAGCTTTTCATGAGGAAGTTTCCATTAATGCGATTTT |
| 1201 | TCTGGCTCAAACACTATCTTGATACATCAAAAATCACCTCTT |
| 1202 | TAGAGCTTGCGCCGACTTAAACAGCATAACCCTCT |
| 1203 | TCAGACGACGATAAAAACCAGGCTGCGCTTTACCCTGA |
| 1204 | TTAATAAGAGAATATAAAGTCCGGCTTATGCAAATCCAATCG |
| 1205 | ATTCGCGTCTGGATCAATTGTATTATATTCGGGCATTTTCGT |
| 1206 | TACGCAGTATAGGCAGAGTCGTTTAGTATCATGACTGTAG |
| 1207 | TCACGTTGGAAGGGTTTTCCCAGTCACGACGTTGTAAGACTCT |
| 1208 | TCAACAAGCTAATGCAGAACGCGAAAGGTAAAGTAAAATT |
| 1209 | TTGTCCAGACGATGTAATTTGTTAGCAACCAAAGGAGCCTTT |
| 1210 | CCTGTTTAACGCCAACACGACAATAGGAAACCT |
| 1211 | TTACGAAGGCATGATTAAAACGAGAATTGCGAATAATA |
| 1212 | TACATCATAGATAAGATCATAGAGAAAACTTTTTCAAA |
| 1213 | ATACCCAAAAATACATTACCAGAAAACAACAT |
| 1214 | TCCGAACAAAGTACATAAATCGCCATACTTACCAG |
| 1215 | AACGTAGAAAGAACTACGCAATAATAACGGAAAAAGTAAGCAGAAACT |

H1 design oligo sequences (5′-3′)

| | |
|---|---|
| 1216 | GCAGTAGAGTAGGTAGAGATTAGGCACTACCATACGATCTAAAGCGCAGTAAGTACAA |
| 1217 | GCAGTAGAGTAGGTAGAGATTAGGCAAAAAAGAGGAACCACAGACAGCCCCGTCTTTC |
| 1218 | GCAGTAGAGTAGGTAGAGATTAGGCAATGCGCCGCTACAATACGCTAGGG |
| 1219 | GCAGTAGAGTAGGTAGAGATTAGGCAACGTTGGTAATATAATTGAAAGCGAGGGAAGGAGCGGAA |
| 1220 | GCAGTAGAGTAGGTAGAGATTAGGCACGCTGGCAGAGCCTGATTATCAGA |
| 1221 | GCAGTAGAGTAGGTAGAGATTAGGCAAGCAAAGCGGATTCTGCAAATGCT |
| 1222 | GCAGTAGAGTAGGTAGAGATTAGGCATATGGGATCGGATTCTCTAAATCG |
| 1223 | GCAGTAGAGTAGGTAGAGATTAGGCAAAGGCGATAAACATTAAATGTGAACAAACG |
| 1224 | GCAGTAGAGTAGGTAGAGATTAGGCAAGGAATAGAAAGGAACTTATTTTG |

TABLE 8
Staple sequences used for the T3 triangle 4 folding.

| SEQ ID | |
|---|---|
| NO: | |
| | Core structure oligo sequences (5′-3′) |
| 1225 | GTGAATAACCTTGCTTCTGTAAATCGTTTTTCGCTATTA |
| 1226 | CCGGGGGTAGGCGGATTGTTTTTATTGTTCTGAAACATGA |
| 1227 | ATATTATTGAGGCGTTTTAGCGAATAGATAAGTCCTGAAC |
| 1228 | AACGGGTAAAATCAGATTAACGTCAACAGTACGGTGAAGG |
| 1229 | TATAGAAGTGATTGCTGAGCAAAACAGAGCCAGCCCGGAA |
| 1230 | GAGCAGGTTTAACGTACGTATAATAGGAACCTCGGAACC |
| 1231 | TATCAGGGGGGGGAAAAGCACTAAGCGGGAGCAGACAGGA |
| 1232 | AATAGCAATAGCTATTTTTCTTACCGAAGCCCTTTTTAAG |
| 1233 | CCGATTTAGAACCTACCAGTTGGGCGGTTGTGTACATCG |
| 1234 | CGATGGCCTTTGGGGTCGAGGTGGGGGTGCCCCGGAAGC |
| 1235 | CCACCCTCTAGGTGTATCACCGTAATTAATTATGAAACAA |
| 1236 | CAAGTTACTATACAGTAAAAATGAAAACACAAGAATTGAGACAGCGGATCTCACGG |
| 1237 | AAGTATTAATTAGCGGTCGAGAGGGTTGATAGGCGGGCC |
| 1238 | TAGAAGAACTCAAACCTTTGATTAAATTAACCGTTGTAG |
| 1239 | GAGCTCGATGAATCGGAGAGAGTTTAAAGCCTCCGTGGTGG |
| 1240 | AATTGCGTGCACCGCTCACAATTCTGAGAAGCGTGCTTT |
| 1241 | TATTACTGGTAATATCATACCTACCCTCGTTAAGGGCGCG |
| 1242 | TTCCGAAAGGGCGAAAAACCGTCACATAAAAAAGGAGCG |
| 1243 | ATTCACAAACCACCAGAACCATTTTTCACCAGAGCCGC |
| 1244 | TTTAGCACAACGCCTCGGGAGAAACAACCCTCCAAATA |
| 1245 | GCCACGGGAACGGATAACCTCACCGGTTTTTAACAATCGGCG |
| 1246 | ATCCTGAATCATATTAAATCAAGTTTTTTTAGTTAATATATTT |
| 1247 | CTTTCAACAATTTACCGTTTTTTTCAGTAAGCGTCATACATGG |
| 1248 | TAATATCCGGTATTCTAAGAACGCTATCCCAAAGCTACAATTT |
| 1249 | TCAGACGATGCATTAAATTCGTAAATAAAGTGGCAGCAAGCGG |
| 1250 | CCTCCTTTTTCGACTTGCGGGGTTACAAATTTTTTAAACAGCC |
| 1251 | GCTCATTTAGAGAGAATGCGTAGATTTTCCCTACTATGGCTTCTGAAATAATCCT |
| 1252 | CTGCGCGCCTGTGCACGCTTTCCATGAAATTGTTATGAGAAGCCCAA |
| 1253 | TAACAGTGCCCGTATAGGTCAGTGCAGCCCTCATAGAGCCAGATGAA |
| 1254 | AGCGCCATGTTTACCAACGCAGAATTAAGCCCTTCTCCGT |
| 1255 | CCCTTAGAAAAGAACGCGATTTTTAAAACTTTTTCAAAAACAAA |
| 1256 | AATTTCATTTGAATTATAAGTATACCACCCTCAGACTCCT |
| 1257 | GGGATTTGTTAGTAAATGAATTTGCACGTAAAACAAGCTCAAACTTAAATTTCT |
| 1258 | ATTAATTTTGAACGCGCCTGTTTTTTTTTCAACAA |
| 1259 | CGCGCTTAATGCGCCGCTACGAATCAGAATCGGAACCATACGAG |
| 1260 | GTCACCTTTTTACTTGAGGTCCCGGAATTTGTGA |
| 1261 | AGAGCCGCAAGAGAAGGATTAGGAGAGGCTGATTTTCAGCGTAACAC |
| 1262 | CCCTCAGAACCGTCAGACTTTTTTTAGCGCG |
| 1263 | TTCTGCCATTCCTGTGGTCGGGAATGAGCTAACTCACATTCACCCAAA |
| 1264 | TTCATTTCAATCATTACCGCGGCTTTATTTTCATCGTAGGAACCAATC |
| 1265 | TAATGAGACCTGTCGTGCCAGCTCCAGCGGCCTGTTCTTCGCGTC |
| 1266 | AATTACCTTTGAATACTGAGTTTCTCCACAGACCTTGAGCAAATAA |
| 1267 | ATTACTGGTAATAAGTTTTAACGGAACAGTTACATGTACGGATAGC |
| 1268 | GAGCAAGAAACAATGAAAACGTACCGGAAATTTTTTTATTCATTAAA |
| 1269 | GATACAGGAGTGTTTGACGCTCAATCATCAATTAATGGAAGGGTGGCAA |
| 1270 | CATATCAAAATTATTGGATTATATTGCTTTG |
| 1271 | GTAACGAGATGAAATAAAGAAATTAACATAA |
| 1272 | GCGAATTAGTTTTCACGCTGCGGCCAGAATGCCCTTTTTTCATGTAGA |
| 1273 | AAGTGCCGGGTTTTGCTCAGTACCCAATACTTTATCGGCCTAATCAGT |
| 1274 | CTTTTACATGTAGCATGTCACCAGTACAAACTGCCACCCTGAAGATGA |
| 1275 | CAGAACAAACGGTACGGAGGCCACATAGCTGTGCACGCGTCAGTGTCA |
| 1276 | AAGGTAAATATTGAGAGATAGACTAATAATAAAGAAACGATTTTTTGT |
| 1277 | CATTTAACCAGTACATAAATCAATATATGTGAAAGAAAAAACATCAAG |
| 1278 | TGGATTATAACAGGAAAATTTTTCGCTCATGGAA |
| 1279 | GCAGCAAAGGTCAGTAAGAGCCGTTATTAGACTCAGCGGG |
| 1280 | CAATTCGACCATTGCGCCTGCAACACCTGA |
| 1281 | AAAGAGGATTGACAAGGATTTTAACGCCAAAGTAAATTGTAGACTGAGACGACG |
| 1282 | ACATCGCCGCAAAGAATACCAAAATGCTGTAGAGAGGTCAAAAAGAA |
| 1283 | TTTCGCACAGCCGGAATCCGCGACCTGCTCCACATCCCTT |
| 1284 | GAACCCTTTACATTGGCAGATTCATATTCACCAGAAGGAGCGGAACGCGGTC |
| 1285 | ACATAAAAGGGACATTAATGCGCGTACCGAACGTGGCACAGACAATATTTT |
| 1286 | TCAGATGCCGGGTTACCTTTTTTCAGCCAGCGGTGCCGGTGCCCCCTGCA |
| 1287 | TGCCAACGGCAGCACCTGCCGGACTATCATTTTGCGAACCACCACACCCG |
| 1288 | ATCATACAGACCATTATCTGCGAAGCTTGCCC |
| 1289 | TGTCGAAACGAGGCGCAGACGGTCTGAACCTTTTAGTTT |
| 1290 | GTGTAGCGGTTTTTCACGCTGCGGCCTCCGGCCAGAGGG |
| 1291 | TGAATGGCTATTAGTCTTTCTGGCCAAAAGAATACTTAGAAGCAATAGA |
| 1292 | GCTCATCGCTAATACATCAAATATCCTAAAGCATCACCTTGGGCGCGAG |
| 1293 | CTATATTTTCATTTGGCAATCATAAACGTAACAAAGCT |
| 1294 | CTTATAAATCGCTGATTGCCCTTTTTTTACCGCCTGGCCCTG |
| 1295 | AATCAACAGTTGAAAGGAATTTTTTGAGGACGTGAGCC |
| 1296 | TAACAACTAGTTGGCACCACGCTGAGAGCCA |
| 1297 | ACCCTGACTATTATAGCACCGCTTCGTTTTAA |
| 1298 | CGTCAGCGTGGTGCTGGTCTGTGCTTTTTGCGCGCATCGTATAGGTCA |
| 1299 | CCACGCTGGTTTGAACCAGCTTACGGCTGGAGGTGGTTGCGG |
| 1300 | ACACTGGTCTTTGCTCGTCATAAAATCTGGTCAATAGATT |
| 1301 | TGTTACTTTCAATCCGCCGGGCGCGTCCAGCATTTACAAAGAACGTTA |
| 1302 | TCATGGTCCGAGTAAAAGAGTTTATCTTTTTTAAATATCTTT |
| 1303 | TATTACTTTTTGCCAGCAACTCGTAGGAGCACTATGAGCCAAAGGTTT |
| 1304 | GAACCACCAGCAGAAGATTAAAAAAACTGATAGCCCTAAA |
| 1305 | CCAACGCGCGGGGAGAGTTTTTCGGTTTGCGTATTGG |
| 1306 | AAAATCCTGTTTGATAAGCCGGCGAACGTGGC |
| 1307 | CCGCACAAACGTGGACTTTTTCCAACGTCAAATCGGCAAAATC |
| 1308 | CGATTAATTTTTGGGATTTTTAAACATTTTTGAGGCATTAAATC |
| 1309 | CAGGAAGAAGGGGACGACGACAGTTAGATGGGGATGGCTTACACGACC |
| 1310 | AACCGGATAACGAGTAAGGAATTACGTTTACCGATAGCGT |
| 1311 | AGTAACATTTGTAGAACGTTTTTTATTGCCGTTCCGGCAAATCGGCCT |
| 1312 | AGAGGGAAATAAAAACGTTTTAAAACAGTTGATTCCCAAT |
| 1313 | CTGGTGCCGGAAATCTTTCCAATACTGCGGAATCGT |
| 1314 | GATACATTCCCAAATCAGGGAACCTTTGTATCATCGCCTGATAAATTG |
| 1315 | GGTACCTCCTCACATTTTTTTGAGGAGCGGCTGG |
| 1316 | CAGATGAAATACCAAGCGCGAAACAAAGTACCCTTATGC |
| 1317 | TTAGTGATGAAGGGTAAAGTTAAACGATGCTGCGTCTCGT |
| 1318 | CTGATTATCAGATGTTTTTTGGCAATTCGTCTGAA |
| 1319 | TTAACACCTCTGACCTGAAAGCGTCAGAGATATTAATTTTAAAAGCT |
| 1320 | TCAACTAATGCAGATACATAAGAACTGGCTCATTATCAGCGATT |
| 1321 | CAACTTTGCGGATAACCTGTTTAGGTGGCATCA |
| 1322 | GGCAAGATAAAACAGAGGTGAGGCTGAAAAATAAACCCTCAATCAAT |
| 1323 | AGGCTGTCCATCACGCAGTAATAACATTTTTCACTTGGTG |
| 1324 | CGCAAGAAGTCATTGCAGGTCAGTGAATAAGCGAGTAGAGAATATAA |
| 1325 | TGCCATCCCACGCCCCAGCCCGAGGAGTCCACTATTAAAG |
| 1326 | CGAGAGGCTTTGTCAGCAGCAACTAATTGCTTTGAGGAT |
| 1327 | GTGTTCAGCAAATCGTTAACGGCAGCGCCAGGGTTGCCCTTCCCCG |
| 1328 | GGCGGCCTAAGAATTTTTAGCGAAAATCCCGTAAAAAAA |
| 1329 | CGCTATTACGCCAGCCGACAATGACGCCATCCAGCTCATAGCCTCA |
| 1330 | TAACTATAAGACGCTGAGAAGAGTCAATAGTGCCGACAAAAATAAGG |
| 1331 | TCCTCATTAAAGCCCAGACGATCGGTCATAATCAAAATTACCGACC |
| 1332 | GCAAAGCGGATTGCATCTTTTTAAAAGAACTATCATATTTTTCCCT |
| 1333 | ATAAATAAAATCTTTTTAAAAATCAGGCCAGGCA |
| 1334 | TCTAGCTGATGTAGTAGCTTTTTTTAACATCCAATAACTGAAAAG |
| 1335 | TAAATTTTCCGCTTTTATACCGATAGTTGCGCTGGCGAAA |
| 1336 | TACCATTATACCAGCGCCAAAAAACGGCCAGTGCCAAGCTTTCAGAG |
| 1337 | TTAGTATCTTACCAACGCTAATTTGACATTCAACCGATTGAGGGAGG |
| 1338 | CAAAAGGGTTCGCATTAAACGTCTCAGCAGCTTTTTAAAAAATCAT |
| 1339 | TTCGCGTCTGGCCAAACAGCTTGGCGGGATCGTCAATAAGAATAAA |
| 1340 | AGAGAATCGCAAATATTCAACCGTTGTGTAGGTAAAGATTGCAATGCC |
| 1341 | GACGACAAATTTAATGAAGCCTGTTTTTCATCATCAAGTTTGCC |
| 1342 | AGAGCCTAATTTGCCAAGGTTTTGAAGCCTGCATGTTCAGCTAATGCA |
| 1343 | CGGTGTTTTTACAGACCAGGGCAAAAGAATACACTAAAACACTC |
| 1344 | AGGAACAAGGAAACGTATAAAAATTTTTACGCAG |
| 1345 | AAGCAAACTCCAACGATCGGTGCGGGCCCCAACTGTT |
| 1346 | GGGAAGGGTAAGTTGGGTAACGCCTGTGCTGC |
| 1347 | AAACGAACGGCTTTGACCGATATAAGTTTCTTTTTTTCCATATA |
| 1348 | CGTTAACCTAATATTTTGCCTGAGGATCTACAAAGGCTATCGCCACCC |
| 1349 | GTTAAAGGTGTTAAATAAAAATAATGAGTAAGAAGCCT |
| 1350 | CGCCAGCATCAGAACCCCGCCTCCCTCAGAGCGGGTTATAGTGTGATA |
| 1351 | TCTTTGACCCCACCAGTCATTTTTGACGTTGGGAAGAGAATACCACA |
| 1352 | TTCTACTAATAAAAGTAATCGTAAAACTAG |
| 1353 | TCGCAAATGGTCATTGATAATTTTTCAGAAAAGCCCCAAAAA |
| 1354 | ATCGGTTGTTAGCAAAATTTTTTTAGCAATAATTTTTAACCAGGAAGA |
| 1355 | CTCAGGTTTTTGGTTTAGTACCGCAATCCAAT |
| 1356 | AGTTAATTTCATCTTCCGCAAGACATCCTTGAAAACATAGCGATAGCT |
| 1357 | CCGAACAAAAAAGGGCTGTCACAAGCGACAGAGGCATTTTTGGCCTTGA |
| 1358 | TTATTTCACGTGGGAACGAGTAACAACCCGTCGCCTTT |
| 1359 | CGAGGCATTTTTTAGTAAGATTTAGAAAATCTACGTTAATACGAAAGAG |
| 1360 | AGTAATTATGACCCTGTAATATTTTTTTTTGCGGGAGAGCATAAAGCTA |
| 1361 | TGTCTGGATTCGGTCGCATCGCCCACGCATAATTAAGAGGAAGCCTCTT |
| 1362 | AGCGCCATTCGCCATTCAAACGAGAATGACCATTTCATTGA |
| 1363 | AATTGTAGGAAGGGTTTTCCCAGTCACGACGTTGAACGCAATTTGCTT |
| 1364 | TCTCTGAGTTTCAGATTGCGAATAATAATT |
| 1365 | ATCCCCCTATCAGTTGAGAGCAACCTGGCTGACCTTCATTTTTTAAGAGTAATC |
| 1366 | TCGAGGGTTGCAAGGCCCTAAAGGACGGAGTGA |
| 1367 | TGACCTAATAAACAACGTTATACAAATTCTTATTACGAGC |
| 1368 | TGAAACCATGTTAAAATGAGAAAGGCCGGTTGAGGCAGGTAGAATGGAAGCACCGT |
| 1369 | TTAATGCCGGAGAGGGTAGCTATTATGATATTTAAATTG |
| 1370 | ATTAGCGTTCGATAGCAAGGAACCCTCATATATTTTAAAT |
| 1371 | AGCTTTCATCAACGTCAGGATTAGCAATAGGAACAACAAC |
| 1372 | TATGCATTTTTCTAAAGTACGGAGAGTACCTTTTTTTAATTGCTCC |
| 1373 | CGCATAGGGGACTAAACATGTCAATCATTTTTTTGTACCC |
| 1374 | CGGATTGATTTTTCGTAATGGGAACCGTGCATCGCGAACCAGACCG |
| 1375 | TTGCCATCAGGAGACAGTCAAATCACCATCAATTTTGAGA |
| 1376 | CTGATGCACACGCCACCACCGGAAGCCACCCTCAGAGCC |
| 1377 | GTTTGAAACACCGGAACCAGACCTCAGAACCGCC |
| 1378 | TCTAAAGTTTTGTTTTGGGAATTAGATTTTTCCAGCAAAA |
| 1379 | TTTTCACCTCACCAGTAGCACCATAATCAGTATCAATAGA |
| 1380 | TAGCAACGCATGAGGACACTACGAAGGCACCAACCTAAAA |
| 1381 | AGTCTGGAGCAAACAGAGACTACCGAAAGACAGCATCGG |
| 1382 | AGGTCTGAGTAAAATACGTAATGCAGTTTCCATTAAACGG |
| 1383 | CTGAGGCTTGCAGGGAAACGAGGGTTGTATAAGATGAACG |
| 1384 | GTCTTTCCAAAAGTAAGCAGATAGGTGGAGCCGGTGAATT |
| 1385 | TTGACAGGTTTTCATAGCCCCCTTCACCGGAAAAATTCAT |
| 1386 | GCTATTTTGCATAACGGATTCGCCGCTTATCCCATCCTAAGCTGTT |
| 1387 | TTTATCATTCCAAGAATAATCGTTTACGAGAATGGAAA |
| 1388 | AAAATCGCTGCCCCAATAGCAAGCTTAAACCATAATATCAT |
| 1389 | AGATAACCCAGGGAAGCGCATTAGACGGAGGGTAAGCCTTTAC |
| 1390 | TCAAGCCGTTTCACTGCCCTCTGTGGTGGTCATA |
| 1391 | AAATAGCATTGAGCGCAGTACCGCACTCATCGAGT |
| 1392 | TCTGAACAAAGTCAGGAGAATTTGAACCATGCCGCCAG |
| 1393 | CCAGAATCCCACACAACCTAAAGGTCAAGTTTCACTACGAACTGT |
| 1394 | TTTTAATCATTGTGAATTAAACGGAGAGAACTGAC |
| 1395 | TTTTGATACTCAACATCAAAATAGTGACGAGAATGGTTTAATT |
| 1396 | TAAAATGTTGGCTTGAGAACACCAGATTCATTA |
| 1397 | CAGTTTGTCGCACTCCAGCCAGCTTTCCGGTCAGGGTT |
| 1398 | TAATGGGTGGGTCACTGTGGTTTTTCT |
| 1399 | TCCAGTGAGACGGGCAACAAAAAGAATCAGCAGGC |
| 1400 | AGAAAGGAAGCACATCCTCATATGGAACAAATAGGGTTGAGTGT |
| 1401 | TCAGTTACGGAACGGTCGGTGGCTTTGCCC |
| 1402 | TTAAACAGTAGGGCTTAGTCCAGACTAGATTATGTAAATG |
| 1403 | AGTTACCACACCACGCAACATATCATGTAATAAGCCAACGCTCAGAAT |
| 1404 | TGTTTGGGAATAAGTCCAGTATAACTAGAAA |
| 1405 | CGCAAAGAGAAGGAAGAAAATACATACATAAAGGTACT |
| 1406 | TCATAATTTTAGGCATAATTCTATTGAGAATCGCCATATTTCAGT |
| 1407 | TAGCAACTTCGAGCCAGACTCCTATGTGAATTTCTTAA |
| 1408 | AGGTAAAGGAGGCATTAACGCCAAAAAAGAAATATTACGCAGTATATTT |
| 1409 | TCTTGTTAGCAAACGTAACCGAGGATAAAACGAAAGGCTCCAAAAGGA |
| 1410 | TATAAAGTAAATTTATCCCTCCGGCTTAGGTTCAGGTCAT |
| 1411 | TGAGCCAAAAGAACTGGCATGATTAAGTAATAAGAGTTCT |
| 1412 | TGTAGCCGGGTCGGTTTATCAGCAATAACGGAAT |
| 1413 | GACTTTTTGCTACAGATAACGGAACAT |
| 1414 | TTGTTTATTACAGGTAGAAAGATTCCAAATGCTTTATAGT |
| 1415 | TAGTTCAGAAGGCTGCGGAAAGACTTCATTTTTATATCG |
| | H1 design oligo sequences (5′-3′) |
| 1416 | GCAGTAGAGTAGGTAGAGATTAGGCAGATTGTTTTTCTGTATCTTTTGATACGTTAGC |
| 1417 | GCAGTAGAGTAGGTAGAGATTAGGCAAAAAAGAGCCACGTCTTTCCAGACTGCTAAACA |
| 1418 | GCAGTAGAGTAGGTAGAGATTAGGCAGGCGCTAGGGCGCTTAGAGCTTGA |
| 1419 | GCAGTAGAGTAGGTAGAGATTAGGCACGTTGGTGATTATCATCACCAGTCAGAGTTTG |
| 1420 | GCAGTAGAGTAGGTAGAGATTAGGCACGCTGGCACGTGAACAAAGAAACC |
| 1421 | GCAGTAGAGTAGGTAGAGATTAGGCATTCGAGCTTCAAATGCGTTTTGCC |
| 1422 | GCAGTAGAGTAGGTAGAGATTAGGCAGAATAGAAGGATTCTCACGCAAGGCACCTTCC |
| 1423 | GCAGTAGAGTAGGTAGAGATTAGGCAAAGGCGATCAGATTAAATGTGAGCAAACGG |
| 1424 | GCAGTAGAGTAGGTAGAGATTAGGCAATCACGTTGAAAATCTCCAAAGAC |

TABLE 9
Staple sequences used for the T3 triangle 5 folding.

| SEQ ID | |
|---|---|
| NO: | |
| | Core structure oligo sequences (5′-3′) |
| 1425 | TACCGCTGGTAATATCATACCTACCCTCGTTAAGGGCGCG |
| 1426 | GCGAAAGGGGGATGTGCAGTGCCATAGCAGCCCCAGGGTT |
| 1427 | CGTCCGTGTCATTAATTGCGTTGCCGGGTGATGCCGGGTTACCTG |
| 1428 | CAGGGAAGCGCATTTTTTTGACGGGAGAATTAACTGAACA |
| 1429 | CGCGCTTAATGCGCCGCTACGAATCAGAATCGGAACCATACCGG |
| 1430 | AATCGTCGTGATGCAAATCTTTTTAATCGCAAGACAAAGATGAT |
| 1431 | CGATGGCCTTTGGGGTCGAGGTGGTTCTTCGGGGTTTCT |
| 1432 | CCAGAATCTTCACGGTCCTAAAGGTCAAGTTTCACTACG |
| 1433 | AGTACATAAATCAATATATGTGAGTGTTTTTATAACCTT |
| 1434 | TGAACCATATAACCTCTAATGGAAGGGTTAGATCAATATTTGCTTTG |
| 1435 | GAGAATAACATAAAAAGCCAGCTGATAAAATTTTTGAAACGCAAAGA |
| 1436 | GCAAGTTTTTCCGTTTTTATTGAGGTTTTTTTTTAAGCCTTAA |
| 1437 | CACCCAAAGAGATAAAGAAATTGACGTATAATTGATATATCTGAATT |
| 1438 | TGGTGTGTTCAGCAAGAGTAACATGTTTTTATTGTTCCAGTAAGCGT |
| 1439 | CCCTGCGGCTGGTAATCGAATTCGTGCGGCCAGAATATACGAGAGGG |
| 1440 | AGAGCCACCACCCAATAGAAAATTCATTTTTATGGTTTAC |
| 1441 | AAATAATAATTAAACCAAGTACCGTAGTTGCTATATAGAAGGC |
| 1442 | CACCCTCCACAAAATTATTTGCATTTGTTTACCCAATCCAAAATAAA |
| 1443 | CGCAGAGGATAACGGAAGGTGTATTCAGAACCACAAACAACGCCACC |
| 1444 | CATACATGAAGTTTTAATAAACAGTTAATGCTAAACATC |
| 1445 | CCGATTTACTTCTGAAACCGGAAACAATCGGCGAAACGT |
| 1446 | ATTTCATTAAACAAAATTAATTACCCCCTGCCAGTACCAGATGATACA |
| 1447 | TCCGAAAGGGCGAAAAACCGTCACAGCGCCAAGGAGCG |
| 1448 | ACTTGATTTAGTACTACAGTAACAGTACAGATTTTGCA |
| 1449 | AAAGGTGGCAAAAGTTGGGTAACGTTTACAGACCCAGCTACAATTTTA |
| 1450 | AGCAAGCAAATCCTTTTACATCGGGAACGGGTTCCCATCCTAATTTAC |
| 1451 | CGGTATGAGCGCTCACGTGTCACTGCCAGCACGCAGCAAGCGG |
| 1452 | GTGCCCGTACGGGGTCAGTGCCTTCAATACTTTATCGGCCTAATCAGT |
| 1453 | CAGAACAAACGGTACGGAGGCCACGTGCACTCCGGCATCACACTGTTG |
| 1454 | GCTTCTGTAGCAGAACGCGCCTGTTTTTTTATCAA |
| 1455 | TTCGTCACCCGCCACCAGATTTTTCCACCACCAGAGCCGCCGC |
| 1456 | TATCCGGTATCTATCATTACCGCTTTTTCCCAATAAGAACGCG |
| 1457 | ATCAAGATCACTCATCGAGAACAACAATAGATAAGTCCTG |
| 1458 | AGGATTAGGATGCCATTTGTTTTTGAATTAG |
| 1459 | CATTCCAAGAGAAACACGAATTATTTTTGCTCTATTTCGG |
| 1460 | TTTATTTTTTTTGTCACACTGCAAGGCGATTCAT |
| 1461 | CCAAGTTACCTTACACGTTTCTTTGCTCGTCAATTTAACAGAGCATGT |
| 1462 | GATGAATACGCCACCCCACCGTACTCAGGAGGTAGCGGGGTCATTTCA |
| 1463 | CGGAAGCATAAAGTGTAATTGTTAACCGAGCTGGGTAAAG |
| 1464 | TTGGGAAGGGCGATCGGTGCGGGCCTTTTTTTTCGCTATTAC |
| 1465 | TATCAGGGGGGGGAAAAGCACTAAGCGGGAGCAGACAGGA |
| 1466 | CCCTCAGAGCTAGCCCCCTTATTTTTTTGCGTTTGCCATC |
| 1467 | TAGAAGAACTCAAACCTTTGATTAAATTAACCGTTGTAGATCGTTAA |
| 1468 | CATCAAGATGAATTACCTTTTTTAATGGAAACAACAAGAAAGCAAAAG |
| 1469 | CGGCATTTAACCTATTATTCTGAAGAAACAAAATTACCTG |
| 1470 | CCAGCGCATGCCCGCTAGAGAGTTGCGTGCCTCCGTGGTGGT |
| 1471 | GTACCGTATAGCAAGCCCAATAGAACCTACCATATCGACGAGGTGGAGCCGCCAC |
| 1472 | ACAGGAGGTTGAGTTGACGCTCAACTGATTATTTGTTTGGATTTGGCAA |
| 1473 | GGGAACGGAACGATTTCGTAAAACAGAACCCTACTATGGAATCCTGACAGATGAT |
| 1474 | TCGGTCAGGAGTGTACTGGTAATGCTTTTGGCGGATAACCCGGAATTTCGCCTG |
| 1475 | CGTGCTTTATTGCAGGTCAGACGATTGGCCTTAGCCAGAAAGTATAGGTGCCGT |
| 1476 | ATAAATCCTCATTAAGATATTCGCCACCCTCAGAAGCCGTAGATTATTGCTT |
| 1477 | CTTATAAATCGCTGATTGCCCTTTTTTTACCGCCTGGCCCTG |
| 1478 | TAGAAGTACCATTGCTGAGGCGGTCCCTGA |
| 1479 | GACGATGGTGCCGGTTTTTGCCCCCTCCGCAAGAATGCCAAC |
| 1480 | TCTAAAATAACCCTCAATTAACACCGCCTGC |
| 1481 | GGGGTCATTGCAGGCGCTTTTTTTCGCACTCAATCCGCCGGGCGCGGTTG |
| 1482 | GAACCGATAATAGATTAAAAGCATCGAGCCAGCAGCAAATGAACATGTT |
| 1483 | GTGTAGCGGTTTTTCACGCTGCGTTGCCGCCAGCAGGGG |
| 1484 | AACAGTGCGAAGATAAGAGCACTAAATACATTCCGGCCAG |
| 1485 | TATAATGCTGTAGCTCCTCATCTTGGTCAATCATAAGG |
| 1486 | CGGCAAACGCGGTCCCAGCCCGAGGAGTCCACTATTAAAG |
| 1487 | TGATTCCCAAGAGGTCGTACCTTTTTGAAAGA |
| 1488 | AACCTGTCCATCACGCAGTAATAACATTTTTCACTTGAGT |
| 1489 | CTATTATACAAATATCCCAAAATAGGACAGATGAACGGTGGGAACGAG |
| 1490 | GTCTGGTCCGGCCAACAGTGAGACGGGCAACAAAAAGAAT |
| 1491 | CATCAACATCTGGCCTTCCTGTAGTTTTAACCATTGCATCACACGACC |
| 1492 | GAACCCTTTACATTGGCAGATTCCAGAAGCATTTTGCGGAACAAAAACAGCG |
| 1493 | TGGATTATAACAGGAAAATTTTTCGCTCATGGAA |
| 1494 | ATCGCCATTAAAATCTCTGATAGCGGCTATTAGTCTTTAA |
| 1495 | AACGAAAGTGCCGGACTTGTAGAAGGCAGCCTTGAGGATTACTCGTAT |
| 1496 | GAGCGGAATTATCATTTTTCATATTCTCGTCTGAA |
| 1497 | CGTTATTAAATCCCGTGATCAAACGGAAAAAGAGACGCAGCCAGCTTT |
| 1498 | TATTACTTTTTGCCAGTTAGACTTGAAGGTTATGGTGCTGGGCAGCAC |
| 1499 | TCTCCGTGGGAACATAACACGTTAATAAAACGAACT |
| 1500 | ATTCGCGTTAAATGTGAGCGAGTAACAACCAGGCATA |
| 1501 | TTCCAGTCGGGAAACCTTTTTTTCGTGCCAGCTGCAT |
| 1502 | AAAAATCTGCCAAAAGGAATTACGCGTCGGATATTCATTG |
| 1503 | AGAGGCGGCCAGCTTACGTCGGTGGTGCCATCAAATATCAATCTTTAG |
| 1504 | AAAAAAAGCCGCACAGGCGGCTTGCAAAGCGGAATAGGAAGTTAAATC |
| 1505 | AGCGATTATACCAAGCATTCTTAATTGCTGAAGCAACTAAA |
| 1506 | GTTAAACGATGCTGATCATAAAAAATTTTAAAAGTTAACCACCACACCCG |
| 1507 | ATTTTTGCGCGCAGACTGACCCCCCATTAAACGGGTAAAATACGTAAT |
| 1508 | TGCGCGAAGCGAACGAGTTTAGCTAAAGACTTGTCAGAAGCAAAAGA |
| 1509 | ATATAAAAGGGACATTTTTTGAATCCTAAAACGTGGCACA |
| 1510 | AATTTGTAACGTGGACTTTTTCCAACGTCAAATCGGCAAAATC |
| 1511 | CCACGCTGGTTTGCCGTTTTTTCGTCTTTTCACCGCGCGGGG |
| 1512 | ATCAATATCTGGTCAGTTGGTTTTTAAATCCAGCCAGC |
| 1513 | AAGTACAAAGGACTAAAGACTTTTTCATGAGGAAGTTTC |
| 1514 | AACAGAGGTCTGACCTGAAAGCGTCAGAGATATAAATCCTTTGCAAG |
| 1515 | GATAAAAACAGGACGTTGGGAAGGGCTCATTGTAATAGT |
| 1516 | CAGAGGGGATACCAGTGCGTTTTAAGGTCAGGATTAGAGA |
| 1517 | AGGGTAAAAGCACATCCTCAACTGACCAACTAATTGCTCGAAGCCCG |
| 1518 | GCGCGCCTCGAGTAAAAGAGTAGTTGATTTTTAGGAATTGAG |
| 1519 | AATATACCGAACGAACCACCAGCACACGCTGAACCTTGCTGAACCTC |
| 1520 | GCCACTACGAATACACTAAAACAAAAAATCTCTTTTGAT |
| 1521 | ACGAGTAGTAAATTGGGCTTGATCAAGAGTAATCTTAGGCTTTG |
| 1522 | CGATTAATTTTTGGGATTTTTAAACATTTTTGAGGCTACAAACA |
| 1523 | GAGAGATAAAGAATTTTTAGCGAATGTTTACCAGTCCCG |
| 1524 | GACAATATCTGGCCAAAAGAATACAATAGATACAACTAACGGAACG |
| 1525 | CAGCAGGCTTTTTAAAATCCTGTTTGATAAGCCGGCGAACGTGGC |
| 1526 | CGGCTGGAGGTGTCCAGCATCAGCTAATGAATAGCAGCAAGCATCA |
| 1527 | GACTTTCTCCGTGGTGAAGGGATAGCTCTCACTTAAATTT |
| 1528 | TACAGGTAAGGCTTGCTGTGAATTAAATTGTGTCGAAATTTTTTCGCGACCTGC |
| 1529 | TAATGTGTAGGTAAAATTTATCATTCTTAAACAGCTTGA |
| 1530 | AGCCCCAAAAACACCATAAATCAACGTAAAACAATAATAA |
| 1531 | TTTATTTCAACGCAAGGATAAAAGACCCTGTGAGATCTA |
| 1532 | TTAGCGACCCTGAACAAAGTCAGCGCAACTGCACCACGG |
| 1533 | AAGACAAACATTAAAGCCCAAAAGTTAAATAATTATACA |
| 1534 | TACGGTGTCTGGCCAAAGGCCGGAGACAGTCGCATAAC |
| 1535 | AAAATGTTTTTTTTGACTGGACCTTATGCTTTTTATTT |
| 1536 | CAGTACAACTCATAGTTAGCGTAACGATCAAGCAGCGCCA |
| 1537 | AGACTCCTTCTTTCCAAGCGCCATTCGCCATTCAGGCTG |
| 1538 | TGGAGCAATCGGTTTAAAAGGAACAACTAAAGCGACGACA |
| 1539 | TAATTGTAACAAGAGACAATCATAATTAGCAGTGGCAT |
| 1540 | CAATTCTATTAATATTAAGCAAATATTTAAATATTTTC |
| 1541 | AATAGTGAGCAGGGAGTTAAAGGCTCGGTCGCTGAGGCTT |
| 1542 | CAGAAAACGAGAAGCATCGTAACCGTTACGTTGGTGT |
| 1543 | CATTCCACGATTGAGGAGTAGCATTAACACACCCTCAGAG |
| 1544 | ACGGAACAACTATTTTTATGCAGATACAAACGGC |
| 1545 | GCCGGAAACACCGGTTGTACCAAAAACATTATATTTTTAG |
| 1546 | CGCCTGATATCGCCCACAAATCACCATCTTTTTATATGAT |
| 1547 | CATCTTCTATCGATAGCAGCAGACTCCTCAAGAG |
| 1548 | CTCCAAAAGGAGCCTTTACCGATAGGGTAGCTAGGGTGAG |
| 1549 | CAACAGTTAATTCAACCAGACAGCCACTACAAC |
| 1550 | TTAGCAAGATTGACGGCACTCCAATAAATCATACAGGCAA |
| 1551 | AGATGGGCACTCCAGCCAGCTTTCGCCTCAGG |
| 1552 | GGTTATATTGACCGTAATCAGTAGTGTAGCGCGTTTTCA |
| 1553 | ATCAAAATCGTCACCACATTACCAATAAGGCGAACTGGCA |
| 1554 | ATATTTTACAATAAACAAAGCCTGTTTAGTATATAGGCGTT |
| 1555 | TACCGTCGTATCAGGTTGCCTGAGAACCCTCATATATTTTGCCTTTAG |
| 1556 | TGCGGGAGAAGAAGTTTCTTTTTTTCCATATAACAGTTTAAATAT |
| 1557 | AGTAATTTTCATTTGGGGCGCTTTTTAGCTGAAAAGTTTCGCAAATGGT |
| 1558 | ACATGATTTTTAGTATTAAGAGGCAACTATAT |
| 1559 | GATTCAAAATTTTTGAAATACTTTAAATTAAGCAATAAAGGGCAAAGA |
| 1560 | TTTTCATACGTCAGACCGACAGAATCAAGTTTCTTTTTAATTTAATGG |
| 1561 | GATTGACCGTAATGGGATAGGAATACCACATTCAACATTAT |
| 1562 | GAAAACTTTTTCAAATGTAAATGCCTATTAATTAATTTTCCCTTAGAA |
| 1563 | AATAACCTGTAGATTTAGTTTTTTTGACCATTACGGTAATGCCGGAGA |
| 1564 | AACTTTATTTTTATCATCCTGACGACCCAAATCAACGTAACAGCAGCGA |
| 1565 | ACCTCCCGACTTGCGGTTCATCGTAGGAAGAAAACATGTTCAGCTAAT |
| 1566 | TCAGAAAGTAGATTTTGCTAAACAACTTT |
| 1567 | CATAATTATCTAAGAACGCGAATAAGCAAACGTAGAAAATACATACA |
| 1568 | CCTCAGAGGAGAGTCCAAAGGCAGGTGAATAAATCATAGAAGAGTC |
| 1569 | CATAAAGCTAAATCGGAACCAGAGCTCAGAGCAAATTATTAGGGCGAC |
| 1570 | GGATGGCTTAGAGCAACCGTTTTTTCTAGCTGATAAATTAAT |
| 1571 | GACAATGACAACAACCATCTCCAAGGAAGCTTTTTAACTCCAAC |
| 1572 | TGTACCCCGGTTGGAGAGAATAGTCAGCTTGCTTACCGTGTGATAA |
| 1573 | AACGGCTACAGGACAAGAATTTTTCGGATATTCATTAGAAACACCAG |
| 1574 | GCCAGTTTGAGGGGAGAATTGCGTAGCATGTATCGATGAAGATACA |
| 1575 | AATTCGCATTTTTTAAATTTTTCGCCATCAAAATGCTTTAAACAGT |
| 1576 | GACGACGAGTTAATTTACCGGAATAGCCAGCATCACCGTCACCG |
| 1577 | ACCAGACCAAAAAAGGTTTTTTCACGTTGAAAATAGCGTCCAAGCATCT |
| 1578 | CGGAGTTTTTTTTGTATCATAAGACAGCATCGGAACGAGGGTAG |
| 1579 | ATTCGATTTTTCTTCAAAGCGAAAATCAGGTTTTTCTTTACCCTGA |
| 1580 | AGGGTAATAGTATGTTACGGAATAGTGAATTAAAATCACCGGAACCGCC |
| 1581 | CCTCCGGCAAACATAGCGATAGCTTAGATTAACTTAATTGTTTGAAA |
| 1582 | TCAGAACCGCCACCCCACCACCAGTAGCACATGAAACCGACCTAAA |
| 1583 | CAAAATCGAGAAACCAATCAAGGTTCCGCTCACAATTCCACACTAAT |
| 1584 | TGAGAACTTCCTTATTCCTGAATTAACGTCATTCCCAGT |
| 1585 | CCGTAATCGGCTGTCTATACGAGCCAGCCATACTTACCAACGCTAGTTT |
| 1586 | TAGCGTCTTTCAATGAAAAAGCTTTCAGTTGTAAA |
| 1587 | TGGGTAACTCACATAGCTGTTTCCTGTGTGAAAAGCCTGTCACAGTT |
| 1588 | TGTGGTGCTAATCATGGAGCCTCCGGGTGCCTAATGAGTGAGCGAGT |
| 1589 | TAGCTACAAATAAGAGAGGATCCTGAGCGGCGGGCCGTTCTGAGAAG |
| 1590 | TTCAGGTTTTATTTATACGTCAAACAGAGCCTAATTTGCCAGTCCGT |
| 1591 | TCTGGCACTTAGCCTACAGACCTTAATTTCTAAGAACT |
| 1592 | GCGAAACATCCATGTTTGACCTTCAGATGGTAGGCGT |
| 1593 | TTTTACCTTCTTTAGTGATGAATTAAGAGGAGCCGTC |
| 1594 | GCGAGAGGCAGACGACAACACTATCATAAT |
| 1595 | AGGCAAAAGAAGGCACCAACCTAACCACGCAATTTGCGTAT |
| 1596 | TGCCAGGGTGGTTTTTCTCGTCGCTCGTCAGCG |
| 1597 | AGAAAGGAATTGGGCGGTTGTGTGGAACAAATAGGGTTGAGTGT |
| 1598 | TCAGTTTACATCGATGCCGTTCATTCGACA |
| 1599 | TTTTTGAGCAAGAAACAATTTTTAAGCCAGGCAAGACGTTAGTAAATGA |
| 1600 | TGTATGGTCGCGGCACCGCTTCTGGTGCCGGAAAAAAAGTAAGCATTTTT |
| 1601 | TTTTTCAGTTGAGATTTAGGTCACTGCGGAATCGTTTTTTATAAAT |
| 1602 | TTTTTTTAACAACGCCAACCAGTATAAAGCCAACGCTTTTTT |
| 1603 | ATCTTACCAACCGAGCACAAGAATTAGGCAGAGGCATTTTCGAGTTTTT |
| 1604 | AAGTAATAATATAAAGTACCGACAGAATCGCCATATTTTTT |
| 1605 | TTTTTCAACAGTAGGGGACGCTGAGGTCTGAGAGACTACAAATGCAA |
| 1606 | CAGAAGGAGAAGCCCTGAAATAGCAATAGCTTGAGCGCTAATATTTTTT |
| 1607 | TTTTTCAGAGAGATAACCGAAACGCACATATGCGGAATAAAC |
| 1608 | TTTTTTTCAGTGAATAGAAAGATTCATTTTTT |
| 1609 | AAAAGGTAAATTCTTACATGTAATTTGAGTTAAGCCCAATAATAATTTTT |
| 1610 | TTTTTCCAGTAATAAGAGTCTGTCCATCCTTGATTAGGTTG |
| 1611 | TTTTTGATAGCCGAACAAAGTTACTGATTTCAGCGGAGTAGGTAAATCATTGCCT |
| 1612 | GTTGCGCCCGATATATCGCTTTTGCGGGATCGTCACCCTCAAAGCTGCTCATTTTT |
| | H1 design oligo sequences (5′-3′) |
| 1613 | GCAGTAGAGTAGGTAGAGATTAGGCAGGCAATTCGAACCCATCAGCATTGACGACCGC |
| 1614 | GCAGTAGAGTAGGTAGAGATTAGGCAACGACGGCATCTCATTTTCAGGGAACACTGAG |
| 1615 | GCAGTAGAGTAGGTAGAGATTAGGCAGGCGCTAGGGCGCATAGAGCTTGA |
| 1616 | GCAGTAGAGTAGGTAGAGATTAGGCAAGCTCATTAGAAACCACACCAGTCAAACCGAA |
| 1617 | GCAGTAGAGTAGGTAGAGATTAGGCACTGCTCATCGTTGAGTAACATTAT |
| 1618 | GCAGTAGAGTAGGTAGAGATTAGGCAAATCCCCCTCAAAATAAGTTTTGCGTAAGAGC |
| 1619 | GCAGTAGAGTAGGTAGAGATTAGGCAGCCTGTAGTGTAAACGCTAATAGTGAGGATAA |
| 1620 | GCAGTAGAGTAGGTAGAGATTAGGCAAAGATCGCTGAGGAAGATTGTATTTGTTAA |
| 1621 | GCAGTAGAGTAGGTAGAGATTAGGCAAATTAAAGTTTTGTCGTATTACGC |

TABLE 10
Staple sequences used for the T3 triangle 6 folding.

| SEQ ID | |
|---|---|
| NO: | |
| | Core structure oligo sequences (5′-3′) |
| 1622 | CGCGCTTAATGCGCCGCTACGAATCAGAATCGGAACTACCGGGG |
| 1623 | AGTACATATTAACCTCCGGTTTTTTTAGGTTGGGTTATCGCGCA |
| 1624 | TCCGTGAGCATTAATTGCGTTGCGGGTCACGCCGGGTTACCTGCAG |
| 1625 | ATTAGGCAGGTCAGACGATTGGCCAAAGCCAGATAGCCCCCGTCGA |
| 1626 | TATGAGCCGCTCACTGTCACTGCGCAGCACGCGCAACAGCTGA |
| 1627 | ATCATTACCGATAACTCATCGAGTTTTTACAAGCATATAACTA |
| 1628 | TAACGGATTCAGATGATGTATCACGAACCGCCCACAAACGCCGCCA |
| 1629 | GTCACCAGAGCCGCCACCATTTTTAACCACCACCAGAGCCGCC |
| 1630 | AGAACGCGCAATCAATAATCGGCTGAACCTCCTTCATCGTAGG |
| 1631 | CGACTTAGTACCGCAATAAAGAAATTGATTCGACTTGC |
| 1632 | CCAAGTTTTTAACGGGTATTAATTCTAAGTTTTTACGCGAGGC |
| 1633 | TGCGGCTGGTAATGGGAATTCGTAGGCCAGAATGCGTTTGAGGGTTG |
| 1634 | CCTCAGAGACTGGATTATACTTCTTTTTGTTATCCCAATACAAAATA |
| 1635 | CGTTCCTGGTAATATCATACCTACCCTCGTTAAGGGCGCG |
| 1636 | ACATCGGGTACACTGGTCTTTGCTCGTCATAAAAAGAAGAAGATAAGT |
| 1637 | GCCACCACCCTCATCAATAGAAAATTTTTTTATATGGTTT |
| 1638 | GGAAGGGCGATCGGTGCGGGCCTCTTTTTTTGCTATTACGCC |
| 1639 | AATGGAAACTAATTCTGTCCAGATTTTTGACGACA |
| 1640 | GAGAGAATAACATAAAAGCTGGCGATATAATTTTTAAGAAACGCAAA |
| 1641 | TTACATTTAACAATTTCATTTGAATTTTTTTCCTTTTTT |
| 1642 | GCGCAGTGCCCGCTTTTGAGACGGGTGCCTGTCCGGGTCCAC |
| 1643 | TGTGTTCAGCAAATCTAACAGTGTGTTTTTATTGCAGTAAGCGTCAT |
| 1644 | AGTTTATTTTTTTTGTCACAAGGCGATTAAGAAC |
| 1645 | CAGAACAAACGGTACGGAGGCCACCACTCTGTCATCAGATTGTTGCCC |
| 1646 | TAGAAGAACTCAAACCTTTGATTAAATTAACCGTTGTAGGTTAACGG |
| 1647 | TCCTCATTTTGATATTACCCTCAGAACCAGCACCATATCTAACAGTA |
| 1648 | AAGCCGTTTTTCGTAGATTTTCAGGTAGAAACCCTGTTTATCAACAAT |
| 1649 | TTATTCATCAAACATCAAGAAAACAAAATTAAGCTAATGCGTTACAAA |
| 1650 | ATAAAGGTGGCTTGGGTAACGCCACCTTTACAGGGAGGTTTTGAAGCC |
| 1651 | CCCGTATAGGGTCAGTGCCTTGAGCAATACTTTATCGGCCTAATCAGT |
| 1652 | AACAGGGAAGCGCATTTTTTAGACGGGAGAATTAACTGAA |
| 1653 | GCTGGTAGGGCGAAAAACCGTCGCGCCATGAAGGAGCG |
| 1654 | CTCCCTCAGACATAGCCCCCTTATTTTTTAGCGTTTGCCA |
| 1655 | GGAATAGGATATACAGAAAATTATTATTATTTTAACGTCA |
| 1656 | TACAATTTTATCCTGAATCTTACCTGCCAGTTCCAAATAA |
| 1657 | CGATGGCCTTTTGGGGTCGAGGTGTCTTCGCGGTTTCTGC |
| 1658 | ACGAGCATGTTTAACGTCGCCTGATGCTCAGTTTCGGAAC |
| 1659 | TATCAGGGGGGGGAAAAGCACTAAGCGGGAGCAGACAGGA |
| 1660 | GCAATTCATCAATATAGCGGAATTTGCTTTG |
| 1661 | ATCGGCATCTATTATTCTGAAACAGAGGCGAAAATACCAA |
| 1662 | AACGGATAGAAACGATTGAATAATGGAACCCTACTATGGTATCATCAAGAAACCA |
| 1663 | CCGTAACACAAGCCCAATAGGAAAATCCTGATTGTTGTTGTGGAGCCGCCACGGG |
| 1664 | GGATCCCCCCTGCGGGCCGTTTTCTGAGAAGCGTGCTTT |
| 1665 | GTTTTAGCGTCTTTCCTTATCATTATAAACAACATGTTCA |
| 1666 | CCGATTTAAGATGATGGGAAACAATCGGCGAAACGTACA |
| 1667 | AAAACAGACACCCTCACGTACTCAGGAGGTTTCGGGGTTTTTGCTTTG |
| 1668 | TGATGAAATTCAATTACCTGAGCACTGCCTATACCAGGCGTACAGGAAAATAAA |
| 1669 | TTTCGGTGTGTACTGGTAATAAGTTTGATGAGATAAGTG |
| 1670 | GAAGCATAAAGTGTAATTGTTATCCGAGCTCGTAAAGGTT |
| 1671 | ACATGGCTTTTTAACGAACAGTTAATGCCCCACATCCCT |
| 1672 | TGACAGGAGGTTGTTGACGCTCAACGGAACAATATTCCTGATTTGGCAA |
| 1673 | AAAGGGGGATGTGCTGTGCCAAGCAATAGCAGGGGTTTTC |
| 1674 | GAGGGGTTAGAACCTACGTATAAATATAAGTGAATTTAC |
| 1675 | ATTAGGATTAGGAGCCATTTTTTTGGGAATT |
| 1676 | GTAAAGTTACATCCTCATATGACCAACTTTGATTTTTGCGCGTTTTA |
| 1677 | GAACCCTTTACATTGGCAGATTTTAAAAGCCTTTGCCCGAACGTCAGCGGAT |
| 1678 | GTCATTGCAGGCGCTTTCTTTTTCACTCAATCCGCCGGGCGCGGTTGCGG |
| 1679 | CTTATAAACTGATTGCAAAAAAATAACAATTCGACAAACCACCACACCCG |
| 1680 | CAACTAATCCATTGCCATTAAAAATCCTGA |
| 1681 | CCGAACACGATTGAGGACCTGCAACGTGAGGCGGTCAGTATAGTACGGT |
| 1682 | AAAAGCCGCACAGGCGGCCTTCAATAAGAGGATCGCGTCTAATAGGAA |
| 1683 | CAGCGTGGTGGTCAGTCAAATGAAGAACGAA |
| 1684 | GAAAGAGGCGGACTTGTAGAACGTAGCCTCCGAGCACTAAACATTTGA |
| 1685 | CTTTACACCCGTAAACAAACTTAAAAAGAGACGCAGAAAGCTTTCAT |
| 1686 | CTGGAGGTGTCCAGCATCAGCGGGATGAATCGAGCAACCGTCAGAC |
| 1687 | CCACCAGCAGAAGATAAGCCCTAACAACAGTT |
| 1688 | TGGTGAAGGGATAGCTTTCCAGTTATCGACATCGTTCCGGTAGATAAT |
| 1689 | CAACATTAGGCCTTCCTGTAGCCAAAAATAATAGCCCGAAACACGACC |
| 1690 | AGAAAGGAAGGCGGTTGTGTACTGGAACAAGAAATCGGCAAAATCC |
| 1691 | GAATAAAAGGGACATTCTGGCCAAAAGAATACTAAAATAGAAAGGA |
| 1692 | TGAATGGCTATTAGACCATTAGATCGCGAGCTATTCGAGCAAAAAGAT |
| 1693 | AGATTTAGTAGAGCTTAAGAGGTCAAAGAGGA |
| 1694 | CAAGCGCGTAAAGCTCAACATGTTGTTTCATTC |
| 1695 | TATTACTTTTTGCCAGAGATTAGATCAATATCTGCTGGTCAGCACCGT |
| 1696 | TGCCCTTCACCGCTTTTTTCGTCTCGTCGCTGGC |
| 1697 | GATCCAGCCGGTGCTTTTTCCCTGCACAAGAATG |
| 1698 | AATTGCTGCAGACGGTCCCCCAGCTAAACGGGTAAAATACGTAATGCC |
| 1699 | TGGATTATAACAGGAAAATTTTTCGCTCATGGAA |
| 1700 | AACATCGCTCTGACCTGAAAGCGTCAGAGATAGGATTTAGAAGTCTT |
| 1701 | TTTGTCTTTAATGCGCGAACTGATAAACAGAGAGTGCCACGCTGAGA |
| 1702 | AAGAAGTAAACAGTAATGTGAGCGAGTAACAACCCGTCATAACC |
| 1703 | TTTGAGTAACATTATTTTTCATTTTGTCGTCTGAA |
| 1704 | ACTACGAATACACTAAAACACTCTAACACCGGGATGGCT |
| 1705 | GACACGAACTAACGGGTAAGAGCAACACTATCGGATTCTCATTGAAT |
| 1706 | GTGTAGCGGTTTTTCACGCTGCGCCGCCAGCAGTTGGGGTTTCTCCG |
| 1707 | CCGTGGGAACAAAGCATAAACAACATTATTACAGGT |
| 1708 | TTGTGAGAACGTGGACTTTTTCCAACGTCAATTGCCCCAGCAG |
| 1709 | AAATCTAAAGCATCACCTTGTTTTTTGAACCCAGCGGT |
| 1710 | AAACAAAGATGTTACTCCCAAATCATTTTAACGCATAGG |
| 1711 | AGAGGCTTTTGTAGTGATGAAGGCAAATATCAGGTTATC |
| 1712 | GCCCTGAGTTTTTGAGTTGCAGCAAGCTAAGCCGGCGAACGTGGC |
| 1713 | CCAGTCGGGAAACCTGTTTTTTGTGCCAGCTGCATTA |
| 1714 | TTAAATATGCAACTAAATCTTTGACAATCATAAGGGAA |
| 1715 | CGATTAATTTTTGGGATTTTTAAACATTTTTGAGGCGCCGTCAA |
| 1716 | TAGCCGGAAGACCAGGGAACTGGCCTACGTTAATAAAGAT |
| 1717 | CATTGTGAATTACCTTATGCGAACGTAACAAAGCTGCTTTGAGG |
| 1718 | AGGGGGTAAAAAACCAGAACCAGAAATTGCTCCTTTTGAT |
| 1719 | TACAACGGACTAAAGACTTTTTCATGAGGAAATTCATTA |
| 1720 | CGAAAATCCTGCGCCAGGGTGGTTTTTTTTTCTTTTCACCAG |
| 1721 | CGCCTGTGCGAGTAAAAGAGTAAATATTTTTTAAACCCTCAA |
| 1722 | GAACGTGCCAAAAGAAGGCACCAACCTAAAACCGCAACCA |
| 1723 | GCTTACGGCGGTGGTGCCATCCCAGCCAGCAGTGGCAAAT |
| 1724 | CAAACGCGGTCCGCTGGTGGTTCCGAGTCCACTATTAAAG |
| 1725 | AGATAGACAAGAATTTTTAGCGATTTACCAGTCCCGGAA |
| 1726 | CTCCTGTCCATCACGCAGTAATAACATTTTTCACTTGACC |
| 1727 | GATTGTATCGTTTGCTAAACAACTTTCAA |
| 1728 | GGGTGAGAAAGGCCGATAGCGATTTAAACAGCTTGATAC |
| 1729 | TCCACAGACCGATTGAATACAGGCAAGGCACCACCCTCAG |
| 1730 | AGAGGGTAGCAGTATGTAACGGAAAGGTGAATCAAAATCACCGGAACCG |
| 1731 | TTTTTAGAACCCTCATATATTTTAAGCCTTTATTGCCTG |
| 1732 | AGGTCAGGAAAGGCTCTTTCACGTTGAAAATCGCGTCCAATACTCTGCC |
| 1733 | TCATAGGTGACCACCGTAATCAGTACTGTAGCGCGTTTT |
| 1734 | TGAGATTTTTGAGATGTCAGGACGTTGTGTCGAAATCCGTTTTTGACCTGCTCC |
| 1735 | AGTAAAAGGTGGCATCAATTCTTTTTACTAATAGTATTAGCTATATTTT |
| 1736 | TCTTTTCAAGCGTCAGAGCGACAGAATCAAGTGAGTCAATACTTTTTC |
| 1737 | TAAGCAAATATTTACCCTGACTATTGTACCCCAATAATTT |
| 1738 | CAAAAGGAGCCTTTAACGATAGTTCAAAGGCTCAAATCAC |
| 1739 | TCAGGTCTCGTAACCGTGCATGCGGTGTAGA |
| 1740 | TTTTAAGGGGAGCAAAATTCAAAATGCCTGAGTAATGTGTTTGCCTTT |
| 1741 | ATGTAAATGCTGATGCCTACCTTTAATCAATATATGTGAGTGAATAAC |
| 1742 | TCATTATTTTTTACCAGGTTTAATTCCCTGACGAGAAACACAGCGAAAG |
| 1743 | TAATCAAAAACGTCACACCATTACTTCTGACCAGAACTGG |
| 1744 | AGAAGGCTTATCCGGTAACCAAGTACCGCAATCCGACAAAAGGTAAAG |
| 1745 | TGAAAGTTTTTATTAAGAGGCTGACTGAGAGA |
| 1746 | CAGATATCACCCTGAACAAAGTCAACTGTTGGACACCAC |
| 1747 | AAAACATTATGACACCGGAACCAGCCCTCAGAGGAAATTAAAAGGGCG |
| 1748 | TGGGCGCACCAGCCAGCTTTCCGGTCAGGAAG |
| 1749 | CATTAGCAATATTGACGCCAAAGAATTAGCAAAATTAAGC |
| 1750 | AGGCCGGAATCCCTGTAATACTTTTGCGGGAGAAATGCAA |
| 1751 | ACGGTAATGTTTATCAGGAACAACTAAAGGAACGACAGTA |
| 1752 | CTGATAAAGCCCACGCAACCGTTCTAGCTTTTTGATAAAT |
| 1753 | CAGTTTGATACATTCAACAGCCCTCACAACGCC |
| 1754 | CAAAGACATTCATTAATACCCAAATAAATTTACGGAATC |
| 1755 | GAGACAGTATCAGGTCATTTCAACCATAAAGCTAAATCGGAATAAAGC |
| 1756 | TAACATCCTAAATTTTTTAATATTTTGTTAAATTCTGT |
| 1757 | TTGAAAACGGGAGTTAAAGGCCGCGTCGCTGAGGCTTGCA |
| 1758 | TGTTAAATCAGCTCATTTTTTTTTTAACCTCAGAAA |
| 1759 | GAAAGATAAAAGTTTTTGAATTACGAGCGGCGGA |
| 1760 | TACAAACTATAGTTAGCGTAACGATCTAAATAACCAGCGC |
| 1761 | GGCTACAGAGGCTCATTCATTTTTTGAATAAGGCTTGTCAACTTTAA |
| 1762 | AAATCCAAATAAAGTAAAGGCGTTAAATAAGACAAGCAAAT |
| 1763 | TGACCGTAATGGGATAGGCAGATACATAACGCCTCATCAGT |
| 1764 | ATTTGGGGACATTTCGCAATTTTTTGGTCAATCAATCATAGAGATCTA |
| 1765 | CAAAGAACCCATCGATAGCAGTCCTCAAGAGAAG |
| 1766 | GCAAGGATAAGATTCCCATTTTTTTCTGCGAACGAGTGTCTGGAA |
| 1767 | AGTTTGAGGGGACGATTGCGAATGGTTGATATAGCATGTAACCTGT |
| 1768 | ACCGTGTGCGCCCAATAGCAATAATTAGCAAACGTAGAAAATACATA |
| 1769 | CCTCAGAACCGCCAAGCCACCACCAGTAGCCAATGAAAGCGAGAAA |
| 1770 | AATATAATGCTGTTGCCGGATTTTTAGGGTAGCTATTTTTGA |
| 1771 | AGTGAATTCTGTAAATCGTCGCTATTAATTAATATACAAAAAATATA |
| 1772 | ATATAACAGTTAAACATCAATATGATATTCATAACCGA |
| 1773 | TTGTACCATCGATGAAGAGTCTTGAATTTCAGCTTAGATAGAATCC |
| 1774 | CCGGAATTTTTCAAACTCCAACTATAGTCATTTTTAAGCAAAGCGG |
| 1775 | AATGACAACAACCATCTCCAAAAAATTAGATTTTTAGTACCTTT |
| 1776 | ATAGTAAAATGTTTAGATTTTTTGGATATTGGGAAGATTTTTAAAT |
| 1777 | TAAGACTCTTCCAGACGCCATTCGCCATTCAGGCTGCGC |
| 1778 | AAGAGAATTCGCAAGAAAATACCGAGAGCCAGTATCACCGTCAC |
| 1779 | AGCCCCAAAAACAGGAATAGAAAGCTTGCTTTCGGTTAATTTCATC |
| 1780 | TTGTATCGCGTAAAACATCAGAAACTCAGAGGTAGCAT |
| 1781 | AGATTTTTTTGTATCATCGCACAGCATCGGAACGAGGGTAGCAA |
| 1782 | AGAAACAACCTGAACAAGAAATACCGCTCACAATTCCACACAAAACT |
| 1783 | TTTCCATCCTAATTTTTAAATCATTGCACGTCCAGTCAC |
| 1784 | GGGAATAATATCCCATACGAGCCGAACAGCCAAGATTAGTTGCTAAGTT |
| 1785 | TAATTTTTGCACCCAGCAAAATGAATTTCAGAGGTAAAACG |
| 1786 | TTTTACTCACATAGCTGTTTCCTGTGTGAAAAGCCTGGGCAGTTGACACCCAA |
| 1787 | GGTGCTGCATCATGGTCCTCCTCAGTGCCTAATGAGTGAGCTATCAT |
| 1788 | TTTGTTTCCAGAGCCTAATTAACGCTAATGAACCATACCTCACC |
| 1789 | CCAGAATCCACGGTCACCTAAAGGATCAAGTTCACTACGCGAGCGTCTTCT |
| 1790 | TTCTTGACAAGAACCGGATGTTTCCATGATTATAC |
| 1791 | ATTGCATCTTCAAAGCAAATAGCGCAGATGAACCTTCATCAAT |
| 1792 | TTACCAGACCTGGCTGACGGTGTACACGAGGCG |
| 1793 | ACGAGAATGAATGCTTTTTTGCCAGCTCACGT |
| 1794 | CCAACGGCTGGTCAGCGCCAACGCGCT |
| 1795 | TAGGCGGTTTGCGTATTGGGTTTGATG |
| 1796 | TCTTTAGGGCCAGAGCAAACGATGTCAAAAGAATT |
| 1797 | TAGATAGGGTTGAGTGTTGCTCACGGAAATTTCTG |
| 1798 | TTTTTATCAGAGAGATAAAGGAAACGATAAACACATGGTTTG |
| 1799 | TTTTTGTAAATTGGGCAGGAATACCACTTTTT |
| 1800 | ACCAGAAGCCGAAGCAATGAAATAGCAATAGATTGAGCGCTAATTTTTT |
| 1801 | TTTCGAGAACATGTAATTTAGGCTTCTTACCAGTATTTTTT |
| 1802 | ATGGGATGCCCACCGCTTCTGGTGCCGGAAACCAAGAAAAGTAAGTTTTT |
| 1803 | AGAGGCATATAATTACAACAGTAGAATTGAGTTAAGCCCAATAATTTTTT |
| 1804 | TTTTTATTCAACTAATGTCACGTTGGAATCGTCATTTTTTAATATT |
| 1805 | TTTTTATTTAACAACGCCCCAGTAATCTTGCTTTATCAAAA |
| 1806 | TTTTTAAAGCCAACGCTCTAGAAAAAGCCTGTTTAGTTTTTT |
| 1807 | TTTTTAAGAGCAAGAAACCCTTTTTAGGCAAAGCGTTAGTAAATGAATT |
| 1808 | CTATCTTAGAAACCGCCCACAAGGGCTTAATTGAGAATCGCCATTTTTT |
| 1809 | TTTTTCAGATAGCCGAACAAAGTTCATCAGCGGAGTGAGGAAGGTAACAAGAGAA |
| 1810 | TTTTTATCATATGCGTTTTTCCCTTTAAGACGCTGAGAAAGGTAAAG |
| 1811 | GCGCCGACTATATTCGTTTTGCGGGATCGTCACCCTCAGCCAGAACGAGTATTTTT |
| | H1 design oligo sequences (5′-3′) |
| 1812 | GCAGTAGAGTAGGTAGAGATTAGGCACCAGAAGGCCCATGTAGCCAGCATACGGCCAC |
| 1813 | GCAGTAGAGTAGGTAGAGATTAGGCAACGGCCAGCAATTTTCAGGGATAGCTGAGTTT |
| 1814 | GCAGTAGAGTAGGTAGAGATTAGGCAGGCGCTAGGGCGCATCGAGCTTGA |
| 1815 | GCAGTAGAGTAGGTAGAGATTAGGCACGCCATCATATTAATTCACCAGTCAGAATTAGA |
| 1816 | GCAGTAGAGTAGGTAGAGATTAGGCACTCATTTGCGTACTCGTATTAAAT |
| 1817 | GCAGTAGAGTAGGTAGAGATTAGGCACCCCCTCAACCATAATTTTTTCAAAAA |
| 1818 | GCAGTAGAGTAGGTAGAGATTAGGCATGTAGCATATTCGCATAATAAATCGGGAGGAA |
| 1819 | GCAGTAGAGTAGGTAGAGATTAGGCAATCGCACTTTTAAATTGTAAACG |
| 1820 | GCAGTAGAGTAGGTAGAGATTAGGCAGGAAGTTTTGTCGTCTCTTATTAC |
| | DNA sequence complementary to DNA handle of |
| | H1 to H3 design oligos |
| 1821 | TGCCTAATCTCTACCTACTCTACTGC |

[0139] It is appreciated that certain features of the invention, which are, for clarity, described in the context of separate embodiments, may also be provided in combination in a single embodiment. Conversely, various features of the invention, which are, for brevity, described in the context of a single embodiment, may also be provided separately or in any suitable sub-combination. All combinations of the embodiments pertaining to the invention are specifically embraced by the present invention and are disclosed herein just as if each and every combination was individually and explicitly disclosed. In addition, all sub-combinations of the various embodiments and elements thereof are also specifically embraced by the present invention and are disclosed herein just as if each and every such sub-combination was individually and explicitly disclosed herein.

[0140] The present invention is not to be limited in scope by the specific embodiments described herein. Indeed, various modifications of the invention in addition to those described herein will become apparent to those skilled in the art from the foregoing description. Such modifications are intended to fall within the scope of the appended claims.

[0141] To the extent possible under the respective patent law, all patents, applications, publications, test methods, literature, and other materials cited herein are hereby incorporated by reference.

[0142] The following Examples illustrates the invention described above, but is not, however, intended to limit the scope of the invention in any way. Other test models known as such to the person skilled in the pertinent art can also determine the beneficial effects of the claimed invention.

### EXAMPLES

### Introduction

[0143] Effective broadband antiviral platforms that can act on existing viruses and viruses yet to emerge are not available, creating a need to explore treatment strategies beyond the trodden paths. Here, we report virus-encapsulating DNA origami shells that achieve broadband virus trapping properties by exploiting a widespread background affinity of viruses to heparan sulfate proteoglycans (HSPG). With a calibrated density of heparan sulfate (HS) derivatives crafted to the interior of DNA origami shells, we could successfully encapsulate adeno-, adeno-associated-, chikungunya-, dengue-, human papilloma-, noro-, polio-, rubella-, and SARS-CoV-2 viruses or virus-like particles, in one and the same HS-functionalized shell system without the need for virus-type-specific binders. Our HS-functionalized shells amplify the individually weak and reversible interactions of HSPG to viral surfaces through strong avidity effects that emerge when curvature-matching HS-coated shells engulf the virus particles. Depending on the relative dimensions of shell to virus particles, multiple virus particles may also be trapped per shell, and multiple shells can also coordinate and enclose clusters containing dozens of virus particles. Since steric occlusion in virus-engulfing shells can prevent viruses from interactions with host cells, the heparan sulfate-coated virus-engulfing shells open an attractive path for establishing a broadband antiviral treatment strategy.

### Example 1: Shell Design and Synthesis Principles

[0144] Here, we address the challenge of creating a broad-spectrum antiviral by exploiting the conserved background binding of HSPG to viruses to irreversibly trap viruses in HS-functionalized neutralizing shells (FIG. 1A, right panel).

[0145] To capture differently sized viruses, we fabricated three DNA origami shell variants and functionalized their interior with the same HS derivative. We used the previously described octahedral and T=1 icosahedral half shell designs (O and T1, respectively; Sigl et al., loc. cit.) featuring 40 nm and 85 nm wide cavities, respectively (FIG. 1D). We also developed a new T=3 icosahedral half shell design, termed T3, for the encapsulation of larger virus particles that do not fit into O and T1 shells (FIG. 1E). The T3 design is a finite-size higher-order assembly consisting of a total of 30 triangular subunits, partitioned as five copies of six different full-size DNA origami triangle designs with specific edge docking rules (FIG. 6). The resulting shell has a cavity diameter of approximately 150 nm. Negative stain transmission electron microscopy (TEM) images validate the successful assembly of T3 shells (FIG. 1F and FIG. 7).

[0146] Staple strands for origami folding reactions were purchased from Integrated DNA Technologies (IDT) and used with standard desalting purification unless stated otherwise. DBCO-modified handle strands were purchased from Biomers at HPLC grade. Azide-modified heparan sulfate derivatives were purchased from Glycan Therapeutics (catalog references: 1a: GT24-AZ-021; 1b: GT24-AZ-005; 1c: GT18-AZ-003; 1d: customized product). VLPs were purchased from The Native Antigen Company, Creative Biostructure and Creative Biolabs (catalog references can be found in Table 12).

TABLE 12
VLP providers and catalog references.

| VLP | Provider | Reference |
|---|---|---|
| Poliovirus type 3 | Creative Biolabs | VLP-003YF |
| Dengue type 1 | The Native Antigen Company | DENV1-VLP-100 |
| Norovirus G II.4 | The Native Antigen Company | REC31620-100 |
| HPV 16 | Creative Biostructure | CBS-V641 HPV16 |
| Chikungunya | The Native Antigen Company | CHIKV-VLP-10 |
| SARS-CoV-2 | Creative Biolabs | VLP-050YF |
| Rubella | The Native Antigen Company | REC31651-100 |

[0147] Folding of DNA origami triangular subunits

[0148] DNA origami structures were folded in one-pot reactions containing 50 nM of single-stranded scaffold DNA (M13, 8064 bases) and 250 nM of each staple strand in a standardized “folding buffer” (FoBx) containing x=20 mM MgCl₂, 5 mM Tris Base, 1 mM EDTA and 5 mM NaCl at pH 8.00. Scaffold M13 was produced as previously described based on M13 8064 as scaffold sequence (SEQ ID NO: 1; Engelhardt, F. A. S. et al., ACS Nano 13 (2019) 5015-5027). All folding reactions were subjected to optimized thermal annealing ramps (Table 13) in a Tetrad (Bio-Rad) thermal cycling device. It should be noted at this point that any variant of M13 8064 or in fact any other single-stranded DNA of sufficient length could have been used as scaffold sequence together with a correspondingly designed set of staple strands. Alternatively, DNA origami structures of the type used in the present application could be constructed by using different sets of overlapping single-stranded oligonucleotides and standard DNA origami techniques.

TABLE 13
Temperature ramps and scaffold used for each DNA origami
triangle subunit. For scaffold sequence see SEQ ID NO:
1 in Table 1. For staple sequences see Tables 2-10.

| | Denaturation | Temperature | Storage | |
|---|---|---|---|---|
| | step (15 min) | ramp (1° C./1 | temperature | |
| Structure | (° C.) | h) (° C.) | (° C.) | Scaffold |
| T_octa | 65 | 60-44 | 20 | M13 |
| | | | | 8064 |
| T1 (pentamer | 65 | 58-54 | 20 | M13 |
| triangle) | | | | 8064 |
| T1 (ring triangle) | 65 | 65-52 | 20 | M13 |
| | | | | 8064 |
| T3 (6 triangles) | 65 | 56-52 | 20 | M13 |
| | | | | 8064 |

### Purification of Triangle Subunits and Shells Self-Assembly

[0149] All origami structures were purified using agarose gel extraction (1.5% agarose containing 0.5×TBE and 5.5 mM MgCl₂) and centrifuged for 30 min at maximum speed for residual agarose pelleting. If the origami needed a concentration step, ultrafiltration (Amicon Ultra 500 μl with 100 kDa molecular weight cutoff) was performed prior to shell assembly. For shell assembly, the purified triangles were mixed in 1:1 ratio. Typical triangle subunit concentrations ranged from 5 to 400 nM, while assembly times depended on the shell type. Table 14 summarizes and offers a comparison on the optimized salt concentrations, temperature, and self-assembly times required for all shells used in this study.

TABLE 14
Half-shells assembling conditions.

| Structure | [MgCl₂] (mM) | Temperature (° C.) | Time | |
|---|---|---|---|---|
| O shell | 40 | 40 | overnight | |
| T1 shell | 40 | 40 | 24 | h |
| T3 shell | 25 | 40 | 8 | weeks |

[0150] The assembled shells were UV cross-linked for 1 h at 310 nm using Asahi Spectra Xenon Light source 300 W MAX-303 (Gerling, T. et al., Sci. Adv. 4 (2018) eaau1157). Buffer exchange to 1×PBS containing 10 mM MgCl₂ was performed prior to VLP encapsulation experiments using ultrafiltration (Amicon Ultra 500 μl with 100 kDa molecular weight cutoff) or dialysis (D-Tube™ Dialyzer Mini, MWCO 12-14 kDa, 2×500 ml exchanges over 8 h, r.t).

### Heparan Sulfate Attachment to DNA

[0151] We used a strain-promoted azide-alkyne 1,3-dipolar cycloaddition reaction (SPAAC) to covalently attach a heparan sulfate derivative to a DNA oligonucleotide (FIG. 1B, FIG. 5) which can hybridize to specific acceptor sites in the interior of the DNA origami shells: single-stranded DNA extensions termed “handles”. For the coupling, we used azide-group modified HS derivatives containing either 8 or 18 saccharide monomers (1a and 1c, respectively), including monomers such as N-acetyl-glucosamine and glucuronic acid which characterize HS polymers. As controls, we used 8-mer and 18-mer polysaccharides lacking the sulfate and sulfonate groups (1b and 1d, respectively). The DNA oligonucleotide to be clicked to the different HS polymers was modified with a dibenzocyclooctyne (DBCO) moiety (2), and the SPAAC reaction occurred rapidly upon mixture of both components. We analyzed the reaction products (3a-d) by polyacrylamide gel electrophoresis (PAGE), which revealed different electrophoretic mobilities for the different product versions consistent with expectation (FIG. 1C). Higher molecular weight reaction products had slower mobility, and the sulfate-containing products migrated faster in the gel compared to the products lacking the sulfate groups, which we attribute to the additional negative charges.

[0152] Excess of azide-modified heparan sulfate derivatives (1a-d) were mixed in a 4:1 ratio with DBCO-modified DNA to form the respective products (3a-d). MgCl₂ was added to a 0.5 M concentration and the mixture was left overnight at 37° C. to achieve >90% conversion. The products were run in a preparative 10% PAGE gel for 2 h at 35 W. Subsequently, the product bands were cut away and were crushed. 1×TEN buffer (10 mM Tris-HCl, 1 mM EDTA, 100 mM NaCl, pH 8.00) was added to dissolve and recover the modified oligonucleotides, and EtOH precipitation was used for concentration and buffer exchange. The pure products were redissolved and kept in double distilled H₂O at either 4° C. or −20° C.

### Attachment of Heparan Sulfate-Modified DNA Constructs to DNA Origami Shells

[0153] We then hybridized the HS-modified DNA oligonucleotides to sequence-complementary single-stranded DNA handles protruding from the target DNA origami shell's interior surface.

### Testing of Different Heparan Sulfate-Coupled DNA Origami Shells

[0154] In initial experiments with adeno-associated virus serotype 2 (AAV2) we explored three different DNA handle designs: proximal (H1), distal (H2), and branched (H3) to determine the type and density of the HS modifications required for efficiently trapping viruses (FIG. 1G). These initial experiments with O half-shells showed that H1 was least efficient, and both H1 and H2 designs were not as efficient for virus trapping as the H3 branched handle design. Samples were analyzed via negative stain transmission electron microscopy (TEM), where images were collected using an automated montage setup to minimize bias. Blind TEM quantification of particles revealed about 96% of shells to be occupied with AAV2 when H3 was hybridized to the 18-mer HS derivative (3c), improving from the about 30 and 84% of occupied shells achieved with H1 and H2, respectively (FIG. 8). We therefore used the branched handle design H3, and the HS 18-mer variant (3c) henceforth, unless otherwise specified. We confirmed that the interaction with AAV2 is due to the sulfate and sulfonate groups present in the HS structure, as the 3d HS derivative used as negative control did not demonstrate any binding (FIG. 9). Importantly, all AAV2 particles were trapped with O shell excess (FIG. 10).

### Example 2: Trapping of Different Viruses by DNA Origami Shells

[0155] With the HS handle design thus established, we tested the HS-modified DNA origami shells for their ability to trap a variety of exemplary viruses and virus-like particles (VLPs) (Zeltins, A., Mol. Biotechnol. 53 (2013) 92-107). Our target virus library sampled enveloped and non-enveloped particles, particles from different viral families, and particles with dimensions ranging from 25 to 90 nm (Table 11, see also FIG. 11 for TEM images).

### Maturation of Dengue VLPs

[0156] Dengue VLP maturation was adapted by published methods (Yu, I.-M. et al., Science 319 (2008) 1834-1837; Yu, I.-M. et al.; J. Virol. 83 (2009) 12101-12107). Briefly, dengue VLP sample (10 μl, 0.39 mg/ml, The Native Antigen Company, cat. no. DENV1-VLP) was added to MES buffer (10 μl, 50 mM, pH 6.00) and gently mixed. Next, CaCl_{2 (aq)} (0.75 μl 0.1 M) and furin (3.9 μl, 2000 U/ml, New England Biolabs, cat. no. P8077) were added and mixed, and the sample was incubated at 30° C. for 16 h. After incubation, Tris buffer (25 μl 100 mM Tris-HCl, 120 mM NaCl, pH 8.00) was added to the sample, and the sample was immediately dialyzed against 1×PBS (D-Tube™ Dialyzer Mini, MWCO 12-14 kDa, 2×50 ml exchanges over 24 h, 4° C.). Matured dengue VLP sample was used immediately and stored at 4° C.

### Viruses and VLPs Encapsulation

[0157] We used HS-modified O shells to sequester AAV2, poliovirus, mature dengue, and norovirus (FIG. 2a); HS-modified T1 shells to trap human papilloma virus 16 (HPV 16), SARS-CoV-2, chikungunya and rubella particles (FIG. 2b); and the HS-modified T3 shell for enclosing adenovirus 5 (FIG. 2c and FIG. 12 for TEM tomography).

[0158] Pre-assembled and UV-welded shells in 1×PBS containing 10 mM MgCl₂ were mixed with a VLP sample in the appropriate ratio to achieve either shell or VLP excess. The MgCl₂ concentration was adjusted to 10 mM and the samples were incubated at RT for 2 h. Usual amounts of sample for TEM analysis range from 5-10 μl total solution at about 10 nM triangle origami concentration. Negative stain TEM grids were prepared immediately after the 2 h incubation.

### Negative Staining TEM

[0159] Samples were incubated on glow discharged (45 s, 35 mA) formvar carbon-coated Cu400 TEM grids (Electron Microscopy Sciences) for 90 to 120 s depending on origami and MgCl₂ concentrations. Next, the grids were stained for 30 s with 2% aqueous uranyl formate containing 25 mM NaOH. Imaging was performed with magnifications in between 10,000× and 42,000× in a SerialEM at a FEI Tecnai T12 microscope operated at 120 kV with a Tietz TEMCAM-F416 camera. TEM micrographs were high-pass filtered to remove long-range staining gradients and the contrast was auto-leveled using Adobe Photoshop CS5. To obtain TEM statistics in an unbiased fashion, automatic grid montages were acquired. For detailed information on selected particles, negative stain EM tomography was used as a visualization technique. The tilt series were performed from −50° to +50° and micrographs were acquired in 2° increments.

[0160] Tilt series were processed with Etomo (IMOD) to acquire tomograms (Kremer, J. et al., J. Struct. Biol. 116 (1996) 71-76). The micrographs were aligned to each other by calculating a cross correlation of the consecutive tilt series images. The tomogram is then generated using a filtered back-projection. The Gaussian-Filter used a cutoff between 0.25 and 0.5, and a fall-off of 0.035.

TABLE 11
Target viruses and virus-like particles tested in this study.

| | | | | Genome | Approx. | |
|---|---|---|---|---|---|---|
| Virus/VLP | Family | Enveloped | Surface details | type | size (nm) | References |
| AAV2* | Parvoviridae | No | 3 capsid proteins | ssDNA | 25 | 1 |
| Poliovirus type 3 | Picornaviridae | No | 4 capsid proteins | ssRNA^{‡} | 30 | 2 |
| Dengue type 1 | Flaviviridae | Yes | 1 envelope protein | ssRNA^{‡} | 30-40 | 3 |
| Norovirus GII.4 | Calciviridae | No | 1 capsid protein | ssRNA^{‡} | 30-45 | 4 |
| HPV 16 | Papillomaviridae | No | 2 capsid proteins | dsDNA^{‡} | 35-50 | 5 |
| SARS-CoV-2 | Coronavirus | Yes | 1 envelope, 1 spike protein | ssRNA^{‡} | 30-70 | 6 |
| Chikungunya | Togaviridae | Yes | 2 envelope proteins | ssRNA^{‡} | 65-70 | 7 |
| Rubella | Matonaviridae | Yes | 2 envelope proteins | ssRNA^{‡} | 65-80 | 8 |
| Adenovirus 5* | Adenoviridae | No | 3 capsid proteins | dsDNA | 90 | 9 |

*Infectious virus;
^{‡}Data referring to the infectious virus which is modelled by a VLP in this study.
1. Liu, A. P. et al., J. Pharm. Biomed. Anal. 189 (2020) 113481;
2. Hogle, J. M., Annu. Rev. Microbiol. 56 (2002) 677-702;
3. Kuhn, R. J. et al., Cell 108 (2002) 717-725;
4. Chan, M. C. W. et al., P. K. S. 51-63 (2017) doi: 10.1016/B978-0-12-804177-2.00004-X;
5. Goetschius, D. J. et al., Sci. Rep. 11 (2021) 3498;
6. Yao, H. et al., Cell 183 (2020), 730-738.e13;
7. Yap, M. L. et al., Proc. Natl. Acad. Sci. 114 (2017) 13703-13707;
8. Mangala Prasad, V. et al., PLOS Pathog. 13 (2017) e1006377;
9. Russell, W. C., J. Gen. Virol. 90 (2009) 1-20

[0161] Interestingly, in many instances the multivalent interactions between the HS coating on the shell interior and the virus particles appeared sufficiently strong to support substantial elastic deformations of the surrounding shell. For example, the T3 shell material deformed from spherical to elliptical around adenovirus particles, presumably driven by maximization of the number of molecular interactions between the HS moieties on the shell interior surface and the viral surface, at the expense of elastically deforming the shell. The O shells deformed occasionally so that up to four AAV2 particles were accommodated in its cavity (FIG. 3a), even though by design the O shell has only room for one AAV2 particle if it were completely rigid. The T1 shell also flexed to fit up to three HPV 16 copies (FIG. 3b). Depending on the relative stoichiometry between shells and virus particles, we also observed sandwich-like structures where two shells coordinated one virus particle (e.g., with HPV 16 and O shells, FIG. 3c). If the shell diameter exceeded substantially the target virus dimensions, multiple target particles could be sequestered. For example, we observed up to six AAV2 per T1 shell (FIG. 3d), and up to three chikungunya in T3 shells (FIG. 3e and FIG. 13 for TEM tomography). Furthermore, multiple copies of HS-modified shells could also cooperatively encapsulate dozens of AAV2 particles in clusters surrounded and protected by DNA origami shell material (FIG. 3f). These results support the notion that the shells are flexible to adapt and capture also more pleomorphic virus particles.

[0162] In the negative staining TEM images, we saw that the chikungunya VLP particles appeared to completely fill the T1 cavity. Presumably due to the resulting high degree of shape-complementarity, we could efficiently trap chikungunya particles within T1 shells using any of the different handle designs described in FIG. 1G in high yields (H1, 3a, 90% full shells). In fact, we could trap chikungunya even with the 3b negative control, which are shells with a coating lacking the sulfate and sulfonate groups, albeit at lower yield (H1, 3b, 54% full shells, see also FIG. 14). We interpret this phenomenon as a manifestation of molecular recognition on the mesoscale. The effect is presumably due to cooperative amplification of weak electrostatic interactions between the negatively charged DNA shells and the chikungunya particles as they interact over extended surface areas. Incidentally, this observation also suggests another route for modification-free virus trapping which considers precisely tailoring shells to the dimensions of the target virus.

[0163] Dengue virus, as well as some other viruses, present two distinct “mature” and “immature” conformations. The viral surface proteins must undergo certain conformational changes to become infectious, allowing them to move between vector and host, and/or infected and healthy cells (Yu, I.-M. et al., Science 319 (2008) 1834-1837; Yu, I.-M. et al., J. Virol. 83 (2009) 12101-12107; Lim, X.-X. et al., Nat. Commun. 8 (2017) 14339; San Martín, C., Virus Maturation. In: Physical Virology: Virus Structure and Mechanics (ed. Greber, U. F.) 129-158 (Springer International Publishing, 2019), doi: 10.1007/978-3-030-14741-9_7). While the usage of VLPs is highly convenient for safety reasons, we do acknowledge some limitations. For instance, initially our dengue VLP samples contained a high percentage of immature particles which did not bind to our HS-functionalized shells. To overcome this, we induced enzymatic maturation of the dengue VLPs, as would occur in vivo, and observed binding of the matured particles (FIG. 2a dengue and FIG. 15).

[0164] We also performed cryogenic electron microscopy (cryo-EM) measurements of HPV 16 and chikungunya VLPs trapped inside O and T1 shells, respectively (FIG. 4).

### Cryo-EM

[0165] DNA origami shells were prepared and functionalized, and viruses trapped as described above. Samples (O+HPV: 70 nM triangles; T1+chikungunya: 200 nM triangles) were incubated 60 s on glow-discharged lacey carbon 400-mesh copper grids with an ultrathin carbon film. Subsequently, the grids were plunge frozen in liquid ethane with a FEI Vitrobot Mark V (blot time: 2.5 s, blot force: −1, drain time: 0 s, 22° C., 100% humidity, 3 μl sample). Cryo-EM imaging was performed with a spherical-aberration (Cs)-corrected Titan Krios G2 electron microscope (Thermo Fisher) operated with 300 kV and equipped with a Falcon Ill 4k direct electron detector (Thermo Fisher). Automated image acquisition was performed in EPU 2.6 (dose: 42-45 e⁻/Å², exposure time: 3-5 s, 12 fractions, pixel size: 0.23 nm (O+HPV) and 0.29 nm (T1+chikungunya), defocus: −1.5 to −2 μm). Micrographs were processed in RELION-3 (Zivanov, J. et al., eLife 7 (2018) e42166) using MotionCor2 (Zheng, S. Q. et al., Nat. Methods 14 (2017) 331-332) and CTFFIND4.1 (Rohou, A. & Grigorieff, N., J. Struct. Biol. 192 (2015) 216-221). Particles were automatically picked with cryYOLO 1.7.6 (Wagner, T. et al., Commun. Biol. 2 (2019) 1-13). Extracted particle images were classified and selected by visual inspection through multiple rounds of 2D and 3D classifications. Initial models were generated in silico in RELION-3. 3D reconstructions and multibody refinement yielded electron density maps with resolutions of 26 Å for O shells trapping HPV (EMD-13884, 1× O+HPV: 7834 particles, 2× O+HPV: 4634 particles) and 36 Å for T1 shells trapping chikungunya (EMD-13883, 1259 particles, C₅ symmetry).

[0166] Two-dimensional (2D) class average images and 3D cryo-EM reconstructions confirmed that the VLPs were successfully trapped within the respective shell's cavities (FIG. 4b,e and FIG. 16-17). While one O shell is not sufficiently large to encapsulate an entire HPV 16 particle, two O copies can coordinate and completely cover an entire VLP (FIG. 4c). 2D class averages of free HPV 16 showed a variation in particle sizes within the VLP sample (FIG. 18). Consistently, we also found that the gap distances in between O shells (indicated by the white arrows in FIG. 4b) varied depending on whether a smaller or larger HPV 16 particle was trapped. The cryo-EM map that we determined for the complex consisting of a chikungunya VLP in a HS-modified T1 shell reveals the near-perfect fit between the two particles (FIG. 4e,f). The cryo-EM maps provide compelling illustrations of the extent of relative dimensions of the artificial DNA origami shells relative to their viral targets and the extent of surface occlusion that can be achieved by sequestering viruses in shells.

### Example 3: Stability of DNA Origami Shells Encapsulating Viruses/VLPs

[0167] Finally, to test the stability of virus trapping by the shells, we subjected exemplarily a sample consisting of AAV2 encapsulated in O shells to a dilution series. The fraction of occupied shells remained the same prior and after 100-fold dilution and incubation for 14 days in the diluted sample relative to the non-diluted sample (FIG. 19), suggesting that the spontaneous dissociation rate for the complexes formed between AAV2 particles and the surrounding HS-modified shell is at least on the scale of weeks under the conditions tested. The high stability is avidity-driven and can be understood by considering that a spontaneous dissociation of AAV2 from a surrounding shell requires simultaneously breaking dozens of bonds formed between HS chains on the engulfing shell and the virus surface. The likelihood for such event to happen decreases exponentially with the number of HS bonds formed.

### Example 4: Efficiency of Encapsulation of Viruses/VLPs by DNA Origami Shells

### 1-Handle Design Development for Efficient Virus Trapping

[0168] To optimize and calibrate the density needed of our heparan sulfate derivatives, we exemplarily explored the trapping efficiencies of AAV2 with O half-shells using three different handle variants (FIG. 1G and FIG. 8a). The proximal handle (H1) was the shortest tested design and consisted of a DNA extension of 26 nucleotides, positioning the heparan sulfate modification in a proximal arrangement. The distal handle design (H2) included a single stranded extension of 20 thymidines (polyT extension), allowing for the heparan sulfate group to reach further from the origami surface and increase the chances of multivalent binding events. Finally, the branched design (H3) mimicked a branched polymer having two heparan sulfate modifications per handle unit, doubling the local heparan sulfate density.

[0169] The three handle designs were tested in parallel with O half-shells and excess of AAV2 particles. Samples were analyzed via negative stain TEM, where images were collected using an automated montage setup to minimize data collection bias. Particles were quantified blindly to estimate the number of full vs. empty shells for all three handle variants hybridized to heparan sulfate 3c. These experiments revealed that H1 was not as efficient for virus trapping as the longer and denser H2 and H3 handles. With H1, only 20% of O shells were occupied with AAV2, whereas with H₂ and H3 the trapping increased to 84% and 96%, respectively (FIG. 8b). The branched handle design (H3) hybridized to the heparan sulfate 18-mer variant 3c was used henceforth, unless otherwise stated.

### 2-Multi-Virus Trapping and Trapping of Different Virus Types in the Exact Same Shell Unit

[0170] To test if our system could be used as a true broad-spectrum virus-trapping platform, heparan sulfate-modified T1 half-shells were challenged to trap a cocktail of viruses consisting of AAV2, HPV16 and Chikungunya particles. Negative stain TEM characterization of such sample revealed the trapping of all virus types present in the cocktail (FIG. 21). The field of view micrographs in FIGS. 21A and B exemplify the good performance of the system. Some shells were found to encapsulate individual viruses such as one Chikungunya particle (FIG. 21C), one HPV16 (FIG. 21D) and one AAV2 (FIG. 21E), but multiple particles were also trapped at once in the exact same shell unit as seen with several AAV2 (FIG. 21F top), HPV16-Chik (FIG. 21F bottom), AAV2-Chik (FIG. 21G), and AAV2-HPV16 (FIG. 21H).

### 3. Cooperative Shell Trapping of Virus Clusters

[0171] If the shell diameter was substantially larger than the target virus dimensions, we observed that multiple virus particles could be sequestered. Interestingly, multiple copies of HS-modified shells could partition over and cover the surface of AAV2 clusters (FIG. 22).

### SUMMARY

[0172] In conclusion, here we presented a viral trapping system that targets features of viruses that are conserved across many families through the usage of HS derivatives. Overall, we achieved encapsulation of nine different virus and VLP test samples, each representing a different viral family, and different sizes and surface complexities. Our modular shell system creates a locally curved environment within the cavity that enables highly multivalent binding, and that can be optimized according to size and ligand density/type to realize an irreversibly binding broad-spectrum antiviral platform. Our shells can flex and adapt to a certain degree to the shape of trapped virus particles, suggesting that the shell system can also adapt to pleomorphic virus particles.

[0173] We envision that our HS-modified DNA origami shells can act as a cellular surface decoy, sequestering the viruses and preventing interactions with cell surfaces, and thus reduce the effective viral load in acute infections. Testing the therapeutic potential of this system to reduce viral load in vivo remains an important task for the future. Beyond virus neutralization, our system may also serve as a sink for trapping associated viral proteins (FIG. 20), and other side products such as subviral particles that could potentially overwhelm the immune system (Zelikin, loc. cit.; Chai, N. et al., J. Virol. 82 (2008) 7812-7817). Overall, our results strongly indicate that our heparan sulfate-modified shell library has potential to become a relevant therapeutic platform to combat viral infections.

The application's sequence listing, which the Patent Office published only in electronic form, follows.

SEQUENCE LISTING (1821 sequences)

SEQ ID NO: 1 - DNA, 8064 bp, synthetic construct
  source 1..8064: mol_type = other DNA
ggcaatgacctgatagcctttgtagatctctcaaaaatagctaccctctccggcattaatttatcagctagaacggttgaatatcatattgatggtgatttgactgtctccggcctttctcacccttttgaatctttacctacacattactcaggcattgcatttaaaatatatgagggttctaaaaatttttatccttgcgttgaaataaaggcttctcccgcaaaagtattacagggtcataatgtttttggtacaaccgatttagctttatgctctgaggctttattgcttaattttgctaattctttgccttgcctgtatgatttattggatgttaatgctactactattagtagaattgatgccaccttttcagctcgcgccccaaatgaaaatatagctaaacaggttattgaccatttgcgaaatgtatctaatggtcaaactaaatctactcgttcgcagaattgggaatcaactgttatatggaatgaaacttccagacaccgtactttagttgcatatttaaaacatgttgagctacagcattatattcagcaattaagctctaagccatccgcaaaaatgacctcttatcaaaaggagcaattaaaggtactctctaatcctgacctgttggagtttgcttccggtctggttcgctttgaagctcgaattaaaacgcgatatttgaagtctttcgggcttcctcttaatctttttgatgcaatccgctttgcttctgactataatagtcagggtaaagacctgatttttgatttatggtcattctcgttttctgaactgtttaaagcatttgagggggattcaatgaatatttatgacgattccgcagtattggacgctatccagtctaaacattttactattaccccctctggcaaaacttcttttgcaaaagcctctcgctattttggtttttatcgtcgtctggtaaacgagggttatgatagtgttgctcttactatgcctcgtaattccttttggcgttatgtatctgcattagttgaatgtggtattcctaaatctcaactgatgaatctttctacctgtaataatgttgttccgttagttcgttttattaacgtagatttttcttcccaacgtcctgactggtataatgagccagttcttaaaatcgcataaggtaattcacaatgattaaagttgaaattaaaccatctcaagcccaatttactactcgttctggtgtttctcgtcagggcaagccttattcactgaatgagcagctttgttacgttgatttgggtaatgaatatccggttcttgtcaagattactcttgatgaaggtcagccagcctatgcgcctggtctgtacaccgttcatctgtcctctttcaaagttggtcagttcggttcccttatgattgaccgtctgcgcctcgttccggctaagtaacatggagcaggtcgcggatttcgacacaatttatcaggcgatgatacaaatctccgttgtactttgtttcgcgcttggtataatcgctgggggtcaaagatgagtgttttagtgtattcttttgcctctttcgttttaggttggtgccttcgtagtggcattacgtattttacccgtttaatggaaacttcctcatgaaaaagtctttagtcctcaaagcctctgtagccgttgctaccctcgttccgatgctgtctttcgctgctgagggtgacgatcccgcaaaagcggcctttaactccctgcaagcctcagcgaccgaatatatcggttatgcgtgggcgatggttgttgtcattgtcggcgcaactatcggtatcaagctgtttaagaaattcacctcgaaagcaagctgataaaccgatacaattaaaggctccttttggagccttttttttggagattttcaacgtgaaaaaattattattcgcaattcctttagttgttcctttctattctcactccgctgaaactgttgaaagttgtttagcaaaatcccatacagaaaattcatttactaacgtctggaaagacgacaaaactttagatcgttacgctaactatgagggctgtctgtggaatgctacaggcgttgtagtttgtactggtgacgaaactcagtgttacggtacatgggttcctattgggcttgctatccctgaaaatgagggtggtggctctgagggtggcggttctgagggtggcggttctgagggtggcggtactaaacctcctgagtacggtgatacacctattccgggctatacttatatcaaccctctcgacggcacttatccgcctggtactgagcaaaaccccgctaatcctaatccttctcttgaggagtctcagcctcttaatactttcatgtttcagaataataggttccgaaataggcagggggcattaactgtttatacgggcactgttactcaaggcactgaccccgttaaaacttattaccagtacactcctgtatcatcaaaagccatgtatgacgcttactggaacggtaaattcagagactgcgctttccattctggctttaatgaggatttatttgtttgtgaatatcaaggccaatcgtctgacctgcctcaacctcctgtcaatgctggcggcggctctggtggtggttctggtggcggctctgagggtggtggctctgagggtggcggttctgagggtggcggctctgagggaggcggttccggtggtggctctggttccggtgattttgattatgaaaagatggcaaacgctaataagggggctatgaccgaaaatgccgatgaaaacgcgctacagtctgacgctaaaggcaaacttgattctgtcgctactgattacggtgctgctatcgatggtttcattggtgacgtttccggccttgctaatggtaatggtgctactggtgattttgctggctctaattcccaaatggctcaagtcggtgacggtgataattcacctttaatgaataatttccgtcaatatttaccttccctccctcaatcggttgaatgtcgcccttttgtctttggcgctggtaaaccatatgaattttctattgattgtgacaaaataaacttattccgtggtgtctttgcgtttcttttatatgttgccacctttatgtatgtattttctacgtttgctaacatactgcgtaataaggagtcttaatcatgccagttcttttgggtattccgttattattgcgtttcctcggtttccttctggtaactttgttcggctatctgcttacttttcttaaaaagggcttcggtaagatagctattgctatttcattgtttcttgctcttattattgggcttaactcaattcttgtgggttatctctctgatattagcgctcaattaccctctgactttgttcagggtgttcagttaattctcccgtctaatgcgcttccctgtttttatgttattctctctgtaaaggctgctattttcatttttgacgttaaacaaaaaatcgtttcttatttggattgggataaataatatggctgtttattttgtaactggcaaattaggctctggaaagacgctcgttagcgttggtaagattcaggataaaattgtagctgggtgcaaaatagcaactaatcttgatttaaggcttcaaaacctcccgcaagtcgggaggttcgctaaaacgcctcgcgttcttagaataccggataagccttctatatctgatttgcttgctattgggcgcggtaatgattcctacgatgaaaataaaaacggcttgcttgttctcgatgagtgcggtacttggtttaatacccgttcttggaatgataaggaaagacagccgattattgattggtttctacatgctcgtaaattaggatgggatattatttttcttgttcaggacttatctattgttgataaacaggcgcgttctgcattagctgaacatgttgtttattgtcgtcgtctggacagaattactttaccttttgtcggtactttatattctcttattactggctcgaaaatgcctctgcctaaattacatgttggcgttgttaaatatggcgattctcaattaagccctactgttgagcgttggctttatactggtaagaatttgtataacgcatatgatactaaacaggctttttctagtaattatgattccggtgtttattcttatttaacgccttatttatcacacggtcggtatttcaaaccattaaatttaggtcagaagatgaaattaactaaaatatatttgaaaaagttttctcgcgttctttgtcttgcgattggatttgcatcagcatttacatatagttatataacccaacctaagccggaggttaaaaaggtagtctctcagacctatgattttgataaattcactattgactcttctcagcgtcttaatctaagctatcgctatgttttcaaggattctaagggaaaattaattaatagcgacgatttacagaagcaaggttattcactcacatatattgatttatgtactgtttccattaaaaaaggtaattcaaatgaaattgttaaatgtaattaattttgttttcttgatgtttgtttcatcatcttcttttgctcaggtaattgaaatgaataattcgcctctgcgcgattttgtaacttggtattcaaagcaatcaggcgaatccgttattgtttctcccgatgtaaaaggtactgttactgtatattcatctgacgttaaacctgaaaatctacgcaatttctttatttctgttttacgtgcaaataattttgatatggtaggttctaacccttccattattcagaagtataatccaaacaatcaggattatattgatgaattgccatcatctgataatcaggaatatgatgataattccgctccttctggtggtttctttgttccgcaaaatgataatgttactcaaacttttaaaattaataacgttcgggcaaaggatttaatacgagttgtcgaattgtttgtaaagtctaatacttctaaatcctcaaatgtattatctattgacggctctaatctattagttgttagtgctcctaaagatattttagataaccttcctcaattcctttcaactgttgatttgccaactgaccagatattgattgagggtttgatatttgaggttcagcaaggtgatgctttagatttttcatttgctgctggctctcagcgtggcactgttgcaggcggtgttaatactgaccgcctcacctctgttttatcttctgctggtggttcgttcggtatttttaatggcgatgttttagggctatcagttcgcgcattaaagactaatagccattcaaaaatattgtctgtgccacgtattcttacgctttcaggtcagaagggttctatctctgttggccagaatgtcccttttattactggtcgtgtgactggtgaatctgccaatgtaaataatccatttcagacgattgagcgtcaaaatgtaggtatttccatgagcgtttttcctgttgcaatggctggcggtaatattgttctggatattaccagcaaggccgatagtttgagttcttctactcaggcaagtgatgttattactaatcaaagaagtattgctacaacggttaatttgcgtgatggacagactcttttactcggtggcctcactgattataaaaacacttctcaggattctggcgtaccgttcctgtctaaaatccctttaatcggcctcctgtttagctcccgctctgattctaacgaggaaagcacgttatacgtgctcgtcaaagcaaccatagtacgcgccctgtagcggcgcattaagcgcggcgggtgtggtggttacgcgcagcgtgaccgctacacttgccagcgccctagcgcccgctcctttcgctttcttcccttcctttctcgccacgttcgccggctttccccgtcaagctctaaatcgggggctccctttagggttccgatttagtgctttacggcacctcgaccccaaaaaacttgatttgggtgatggttcacgtagtgggccatcgccctgatagacggtttttcgccctttgacgttggagtccacgttctttaatagtggactcttgttccaaactggaacaacactcaaccctatctcgggctattcttttgatttataagggattttgccgatttcggaaccaccatcaaacaggattttcgcctgctggggcaaaccagcgtggaccgcttgctgcaactctctcagggccaggcggtgaagggcaatcagctgttgcccgtctcactggtgaaaagaaaaaccaccctggcgcccaatacgcaaaccgcctctccccgcgcgttggccgattcattaatgcagctggcacgacaggtttcccgactggaaagcgggcagtgagcgcaacgcaattaatgtgagttagctcactcattaggcaccccaggctttacactttatgcttccggctcgtatgttgtgtggaattgtgagcggataacaatttcacacaggaaacagctatgaccatgattacgaattcgagctcggtacccggggatcctcaactgtgaggaggctcacggacgcgaagaacaggcacgcgtgctggcagaaacccccggtatgaccgtgaaaacggcccgccgcattctggccgcagcaccacagagtgcacaggcgcgcagtgacactgcgctggatcgtctgatgcagggggcaccggcaccgctggctgcaggtaacccggcatctgatgccgttaacgatttgctgaacacaccagtgtaagggatgtttatgacgagcaaagaaacctttacccattaccagccgcagggcaacagtgacccggctcataccgcaaccgcgcccggcggattgagtgcgaaagcgcctgcaatgaccccgctgatgctggacacctccagccgtaagctggttgcgtgggatggcaccaccgacggtgctgccgttggcattcttgcggttgctgctgaccagaccagcaccacgctgacgttctacaagtccggcacgttccgttatgaggatgtgctctggccggaggctgccagcgacgagacgaaaaaacggaccgcgtttgccggaacggcaatcagcatcgtttaactttacccttcatcactaaaggccgcctgtgcggctttttttacgggatttttttatgtcgatgtacacaaccgcccaactgctggcggcaaatgagcagaaatttaagtttgatccgctgtttctgcgtctctttttccgtgagagctatcccttcaccacggagaaagtctatctctcacaaattccgggactggtaaacatggcgctgtacgtttcgccgattgtttccggtgaggttatccgttcccgtggcggctccacctctgaaagcttggcactggccgtcgttttacaacgtcgtgactgggaaaaccctggcgttacccaacttaatcgccttgcagcacatccccctttcgccagctggcgtaatagcgaagaggcccgcaccgatcgcccttcccaacagttgcgcagcctgaatggcgaatggcgctttgcctggtttccggcaccagaagcggtgccggaaagctggctggagtgcgatcttcctgaggccgatactgtcgtcgtcccctcaaactggcagatgcacggttacgatgcgcccatctacaccaacgtgacctatcccattacggtcaatccgccgtttgttcccacggagaatccgacgggttgttactcgctcacatttaatgttgatgaaagctggctacaggaaggccagacgcgaattatttttgatggcgttcctattggttaaaaaatgagctgatttaacaaaaatttaatgcgaattttaacaaaatattaacgtttacaatttaaatatttgcttatacaatcttcctgtttttggggcttttctgattatcaaccggggtacatatgattgacatgctagttttacgattaccgttcatcgattctcttgtttgctccagactctca

SEQ ID NO: 2 - DNA, 39 bp, synthetic construct
  misc_feature 1..39: note = artificial DNA sequence
  source 1..39: mol_type = other DNA
cacgttgaggaattgcgaataatcagatgatgaatatac

SEQ ID NO: 3 - DNA, 47 bp, synthetic construct
  misc_feature 1..47: note = artificial DNA sequence
  source 1..47: mol_type = other DNA
agggaagaaagcgaaaggagcgggctgcggctcgttagataaaggga

SEQ ID NO: 4 - DNA, 40 bp, synthetic construct
  misc_feature 1..40: note = artificial DNA sequence
  source 1..40: mol_type = other DNA
cggggaaagccggcgaacgtggcggagctcgattgctttg

SEQ ID NO: 5 - DNA, 40 bp, synthetic construct
  misc_feature 1..40: note = artificial DNA sequence
  source 1..40: mol_type = other DNA
caggcgcagacggtcaaacgtaactggcagcctccggcca

SEQ ID NO: 6 - DNA, 38 bp, synthetic construct
  misc_feature 1..38: note = artificial DNA sequence
  source 1..38: mol_type = other DNA
ccctaaagggagcccccgatttattcctgtgtgaaatt

SEQ ID NO: 7 - DNA, 36 bp, synthetic construct
  misc_feature 1..36: note = artificial DNA sequence
  source 1..36: mol_type = other DNA
aatttcaactttaatcttaataaatttttcgaacta

SEQ ID NO: 8 - DNA, 36 bp, synthetic construct
  misc_feature 1..36: note = artificial DNA sequence
  source 1..36: mol_type = other DNA
ggttttgaagccttaaaacgctaatttttgagcgtc

SEQ ID NO: 9 - DNA, 40 bp, synthetic construct
  misc_feature 1..40: note = artificial DNA sequence
  source 1..40: mol_type = other DNA
atggaaacagtacatattagattaggtgctggtaattttc

SEQ ID NO: 10 - DNA, 40 bp, synthetic construct
  misc_feature 1..40: note = artificial DNA sequence
  source 1..40: mol_type = other DNA
tagaaaatacatacataaaggtgggtattctagaaggtaa

SEQ ID NO: 11 - DNA, 53 bp, synthetic construct
  misc_feature 1..53: note = artificial DNA sequence
  source 1..53: mol_type = other DNA
atagccgaacaaaatagctatcttaccgaagaatggaaacaaatattgatata

SEQ ID NO: 12 - DNA, 47 bp, synthetic construct
  misc_feature 1..47: note = artificial DNA sequence
  source 1..47: mol_type = other DNA
ccaacaggtcaggattagagagtgtacagactcattccaagtagatt

SEQ ID NO: 13 - DNA, 52 bp, synthetic construct
  misc_feature 1..52: note = artificial DNA sequence
  source 1..52: mol_type = other DNA
tctatcagggcgtaatgagtgttgcagcccttcacccattttgaaaaacgct

SEQ ID NO: 14 - DNA, 40 bp, synthetic construct
  misc_feature 1..40: note = artificial DNA sequence
  source 1..40: mol_type = other DNA
atggcccaaacgtggactccaacgcagcacagacaatatt

SEQ ID NO: 15 - DNA, 38 bp, synthetic construct
  misc_feature 1..38: note = artificial DNA sequence
  source 1..38: mol_type = other DNA
gactccttattacgcagtatgttctcccgacttgcggg

SEQ ID NO: 16 - DNA, 38 bp, synthetic construct
  misc_feature 1..38: note = artificial DNA sequence
  source 1..38: mol_type = other DNA
cgaaagacttcaaatatcgcgttgggcttgagatggtt

SEQ ID NO: 17 - DNA, 40 bp, synthetic construct
  misc_feature 1..40: note = artificial DNA sequence
  source 1..40: mol_type = other DNA
gaataagtttattcgagaatgaccataaatcaaaaatcag

SEQ ID NO: 18 - DNA, 50 bp, synthetic construct
  misc_feature 1..50: note = artificial DNA sequence
  source 1..50: mol_type = other DNA
agaaacaataaaattaatttttcgttgtagcagcctgagtagaagaactc

SEQ ID NO: 19 - DNA, 39 bp, synthetic construct
  misc_feature 1..39: note = artificial DNA sequence
  source 1..39: mol_type = other DNA
gcgattataaatggtcaataccgccagccagtatcggcc

SEQ ID NO: 20 - DNA, 47 bp, synthetic construct
  misc_feature 1..47: note = artificial DNA sequence
  source 1..47: mol_type = other DNA
cggagatttgtattacacgaaagaggcaaaagacctccggcttaggt

SEQ ID NO: 21 - DNA, 48 bp, synthetic construct
  misc_feature 1..48: note = artificial DNA sequence
  source 1..48: mol_type = other DNA
aaagactttttcatgaggaagaaaataccacaaaaatagcgagaggct

SEQ ID NO: 22 - DNA, 49 bp, synthetic construct
  misc_feature 1..49: note = artificial DNA sequence
  source 1..49: mol_type = other DNA
ccgacaatgagcgacatttttaatcaagtttatcggcattttcggtcat

SEQ ID NO: 23 - DNA, 37 bp, synthetic construct
  misc_feature 1..37: note = artificial DNA sequence
  source 1..37: mol_type = other DNA
actgcccgctttccagagcagttgggaaaaagagacg

SEQ ID NO: 24 - DNA, 47 bp, synthetic construct
  misc_feature 1..47: note = artificial DNA sequence
  source 1..47: mol_type = other DNA
cattccaagaacgcaaccatcctaatttacgaaaagcctgtttagta

SEQ ID NO: 25 - DNA, 48 bp, synthetic construct
  misc_feature 1..48: note = artificial DNA sequence
  source 1..48: mol_type = other DNA
agaacgcgcctgtttatatcctgacccaatccattaactgaacaccct

SEQ ID NO: 26 - DNA, 38 bp, synthetic construct
  misc_feature 1..38: note = artificial DNA sequence
  source 1..38: mol_type = other DNA
aggcgcatagataaggcttgccagcaaactagcttaat

SEQ ID NO: 27 - DNA, 59 bp, synthetic construct
  misc_feature 1..59: note = artificial DNA sequence
  source 1..59: mol_type = other DNA
cggtcgttcgtgtgataaataaggcgttaaataagaataaagcccacgcataaccgtga

SEQ ID NO: 28 - DNA, 48 bp, synthetic construct
  misc_feature 1..48: note = artificial DNA sequence
  source 1..48: mol_type = other DNA
tttgattagtgccaagcgaaacgtacagcttgagaagagtcaatagtg

SEQ ID NO: 29 - DNA, 44 bp, synthetic construct
  misc_feature 1..44: note = artificial DNA sequence
  source 1..44: mol_type = other DNA
tgccaacgtttttcagcaccgatcaaacttaaatttaatcggcc

SEQ ID NO: 30 - DNA, 34 bp, synthetic construct
  misc_feature 1..34: note = artificial DNA sequence
  source 1..34: mol_type = other DNA
tcagcgtagacgctgaaaacatagcgatagcaat

SEQ ID NO: 31 - DNA, 47 bp, synthetic construct
  misc_feature 1..47: note = artificial DNA sequence
  source 1..47: mol_type = other DNA
aatttatctttagtgagtcacctgtttagctcacgacgtggtggagc

SEQ ID NO: 32 - DNA, 44 bp, synthetic construct
  misc_feature 1..44: note = artificial DNA sequence
  source 1..44: mol_type = other DNA
aaggcacctttttacctaaaagaggctttgaggactacggaaca

SEQ ID NO: 33 - DNA, 40 bp, synthetic construct
  misc_feature 1..40: note = artificial DNA sequence
  source 1..40: mol_type = other DNA
agcttcaaagcgaaccagaccggactgacgagaatatgca

SEQ ID NO: 34 - DNA, 50 bp, synthetic construct
  misc_feature 1..50: note = artificial DNA sequence
  source 1..50: mol_type = other DNA
cgccacgggaacaattctttttactaatagtacaaggcaaagaattagca

SEQ ID NO: 35 - DNA, 44 bp, synthetic construct
  misc_feature 1..44: note = artificial DNA sequence
  source 1..44: mol_type = other DNA
caagaaaattttttaatatccatgttcagctaatgctttccaga

SEQ ID NO: 36 - DNA, 27 bp, synthetic construct
  misc_feature 1..27: note = artificial DNA sequence
  source 1..27: mol_type = other DNA
ttacctgagcagaggcgaattattcag

SEQ ID NO: 37 - DNA, 48 bp, synthetic construct
  misc_feature 1..48: note = artificial DNA sequence
  source 1..48: mol_type = other DNA
ctgctcatttgccgcctcgggaaagtttttctaaaatcctgtttgatg

SEQ ID NO: 38 - DNA, 44 bp, synthetic construct
  misc_feature 1..44: note = artificial DNA sequence
  source 1..44: mol_type = other DNA
tcgtcgtatgttttttagtgtgtccatcacgcacggaccgagta

SEQ ID NO: 39 - DNA, 38 bp, synthetic construct
  misc_feature 1..38: note = artificial DNA sequence
  source 1..38: mol_type = other DNA
aaaatcccgactttctccttagaaatcacttatacttc

SEQ ID NO: 40 - DNA, 44 bp, synthetic construct
  misc_feature 1..44: note = artificial DNA sequence
  source 1..44: mol_type = other DNA
aactttaatcctttttatcggaaaaggtggcatcggatttgggg

SEQ ID NO: 41 - DNA, 45 bp, synthetic construct
  misc_feature 1..45: note = artificial DNA sequence
  source 1..45: mol_type = other DNA
ttaatttcatacagggtagcattaacatccaaacagctatatatt

SEQ ID NO: 42 - DNA, 48 bp, synthetic construct
  misc_feature 1..48: note = artificial DNA sequence
  source 1..48: mol_type = other DNA
atcctgaggcttgcagggagccggaaacgtcgcttgcttatagttgcg

SEQ ID NO: 43 - DNA, 46 bp, synthetic construct
  misc_feature 1..46: note = artificial DNA sequence
  source 1..46: mol_type = other DNA
caacatgtcgttttcgcctttagcgtcagaagtaacagcaagttac

SEQ ID NO: 44 - DNA, 43 bp, synthetic construct
  misc_feature 1..43: note = artificial DNA sequence
  source 1..43: mol_type = other DNA
tgtaaatggtttgaaataccgacctgacctaaatttaatgctg

SEQ ID NO: 45 - DNA, 39 bp, synthetic construct
  misc_feature 1..39: note = artificial DNA sequence
  source 1..39: mol_type = other DNA
cagaggcattttttttataatcaaggtttaaacatcggg

SEQ ID NO: 46 - DNA, 40 bp, synthetic construct
  misc_feature 1..40: note = artificial DNA sequence
  source 1..40: mol_type = other DNA
gctctcacggcggttggcagcaaccgcaagaactttttta

SEQ ID NO: 47 - DNA, 40 bp, synthetic construct
  misc_feature 1..40: note = artificial DNA sequence
  source 1..40: mol_type = other DNA
aagggataggcaacagttgcgctctaaagcctggggtgcc

SEQ ID NO: 48 - DNA, 38 bp, synthetic construct
  misc_feature 1..38: note = artificial DNA sequence
  source 1..38: mol_type = other DNA
ccgtggtgcaacaggacgctcaatagttggcatctaaa

SEQ ID NO: 49 - DNA, 47 bp, synthetic construct
  misc_feature 1..47: note = artificial DNA sequence
  source 1..47: mol_type = other DNA
gtgttcagcaaatgcggtcggtggtgccatccatttcatttgaatta

SEQ ID NO: 50 - DNA, 40 bp, synthetic construct
  misc_feature 1..40: note = artificial DNA sequence
  source 1..40: mol_type = other DNA
ggccatcgcctgataacaagacaaagaatttttgcgagaa

SEQ ID NO: 51 - DNA, 53 bp, synthetic construct
  misc_feature 1..53: note = artificial DNA sequence
  source 1..53: mol_type = other DNA
gcaacatcagttgacattattgaacgagtagtaaattttaattcgggggtaat

SEQ ID NO: 52 - DNA, 48 bp, synthetic construct
  misc_feature 1..48: note = artificial DNA sequence
  source 1..48: mol_type = other DNA
cagcgaaaacataacgccaaaaggtaaccctccaccatcaaatgccgg

SEQ ID NO: 53 - DNA, 51 bp, synthetic construct
  misc_feature 1..51: note = artificial DNA sequence
  source 1..51: mol_type = other DNA
aaaggtattaaaccaacaacagtagggcttttttaattgagaatcgagcca

SEQ ID NO: 54 - DNA, 53 bp, synthetic construct
  misc_feature 1..53: note = artificial DNA sequence
  source 1..53: mol_type = other DNA
acaataacagccagcctaattaggcgttttagcgaacagcaaacgcgctaata

SEQ ID NO: 55 - DNA, 40 bp, synthetic construct
  misc_feature 1..40: note = artificial DNA sequence
  source 1..40: mol_type = other DNA
aaaggtaatttgtttaacgtcaaacataaaaatattcaca

SEQ ID NO: 56 - DNA, 40 bp, synthetic construct
  misc_feature 1..40: note = artificial DNA sequence
  source 1..40: mol_type = other DNA
acacgttaacggcatcaataaccttgcttttttctgtaaa

SEQ ID NO: 57 - DNA, 53 bp, synthetic construct
  misc_feature 1..53: note = artificial DNA sequence
  source 1..53: mol_type = other DNA
cagaagtattgggaacgcgcgtcatggtcatagctgtgagcttgacttataaa

SEQ ID NO: 58 - DNA, 40 bp, synthetic construct
  misc_feature 1..40: note = artificial DNA sequence
  source 1..40: mol_type = other DNA
tttcaccatttacattggtttttagattcacccggtttgc

SEQ ID NO: 59 - DNA, 40 bp, synthetic construct
  misc_feature 1..40: note = artificial DNA sequence
  source 1..40: mol_type = other DNA
ctgattgcaagcggtctaagaatacgtggaaaggaaggtt

SEQ ID NO: 60 - DNA, 45 bp, synthetic construct
  misc_feature 1..45: note = artificial DNA sequence
  source 1..45: mol_type = other DNA
gcgaacgtataacaaagattgttcatatgtaccccggttgataat

SEQ ID NO: 61 - DNA, 48 bp, synthetic construct
  misc_feature 1..48: note = artificial DNA sequence
  source 1..48: mol_type = other DNA
gctccatgaaatgcaacataaagcttttttaatcggttgtaccaaaaa

SEQ ID NO: 62 - DNA, 46 bp, synthetic construct
  misc_feature 1..46: note = artificial DNA sequence
  source 1..46: mol_type = other DNA
agatttttttaggaaatctacgattgtgaattaccttaagaagcaa

SEQ ID NO: 63 - DNA, 48 bp, synthetic construct
  misc_feature 1..48: note = artificial DNA sequence
  source 1..48: mol_type = other DNA
agcggtgcagtcacactccagaacattttttattaccgccagccattg

SEQ ID NO: 64 - DNA, 44 bp, synthetic construct
  misc_feature 1..44: note = artificial DNA sequence
  source 1..44: mol_type = other DNA
tttgccatcaacatgttttaaaacaccaacaggtagttacttag

SEQ ID NO: 65 - DNA, 48 bp, synthetic construct
  misc_feature 1..48: note = artificial DNA sequence
  source 1..48: mol_type = other DNA
gcaagccgcagaaccacttttcatattttttcaaaatcaccggaacca

SEQ ID NO: 66 - DNA, 44 bp, synthetic construct
  misc_feature 1..44: note = artificial DNA sequence
  source 1..44: mol_type = other DNA
ggtaattcgattgagggaggagaacgcgtgccagtttttttatt

SEQ ID NO: 67 - DNA, 42 bp, synthetic construct
  misc_feature 1..42: note = artificial DNA sequence
  source 1..42: mol_type = other DNA
cgttccgggacccccaaaaatcataccggaaacaatcggctt

SEQ ID NO: 68 - DNA, 38 bp, synthetic construct
  misc_feature 1..38: note = artificial DNA sequence
  source 1..38: mol_type = other DNA
aggctccaaaaggaccatcaagagaaggataccgccac

SEQ ID NO: 69 - DNA, 36 bp, synthetic construct
  misc_feature 1..36: note = artificial DNA sequence
  source 1..36: mol_type = other DNA
ttatccgctcacaattgccagctgtttttattaatg

SEQ ID NO: 70 - DNA, 48 bp, synthetic construct
  misc_feature 1..48: note = artificial DNA sequence
  source 1..48: mol_type = other DNA
ataatacatttgaggaagcagcaatattaattttttagacaggaatac

SEQ ID NO: 71 - DNA, 47 bp, synthetic construct
  misc_feature 1..47: note = artificial DNA sequence
  source 1..47: mol_type = other DNA
gtcaccgaaaattgtcacaatcaatagaaaatgcccgtaaacctatt

SEQ ID NO: 72 - DNA, 38 bp, synthetic construct
  misc_feature 1..38: note = artificial DNA sequence
  source 1..38: mol_type = other DNA
tatcacctatttcggtaaacagttaatgccttctagct

SEQ ID NO: 73 - DNA, 41 bp, synthetic construct
  misc_feature 1..41: note = artificial DNA sequence
  source 1..41: mol_type = other DNA
aggtgaataattagagcatagttagacgttagtaaatttta

SEQ ID NO: 74 - DNA, 40 bp, synthetic construct
  misc_feature 1..40: note = artificial DNA sequence
  source 1..40: mol_type = other DNA
atatctttaggagcacttctgaccatggattagtgagacg

SEQ ID NO: 75 - DNA, 44 bp, synthetic construct
  misc_feature 1..44: note = artificial DNA sequence
  source 1..44: mol_type = other DNA
ggcaaaagcgcgtactatggattcgtaagggagaggcggtgccc

SEQ ID NO: 76 - DNA, 40 bp, synthetic construct
  misc_feature 1..40: note = artificial DNA sequence
  source 1..40: mol_type = other DNA
gagtgttgggggtcgaggtgccgtaaagcactaaatcgga

SEQ ID NO: 77 - DNA, 50 bp, synthetic construct
  misc_feature 1..50: note = artificial DNA sequence
  source 1..50: mol_type = other DNA
ttccagtttggaacaatctttaattagaaccctaacaactttttaataga

SEQ ID NO: 78 - DNA, 48 bp, synthetic construct
  misc_feature 1..48: note = artificial DNA sequence
  source 1..48: mol_type = other DNA
tattaaagctacgtgaaccatcacccaaatcaccggaagcagcaggcg

SEQ ID NO: 79 - DNA, 46 bp, synthetic construct
  misc_feature 1..46: note = artificial DNA sequence
  source 1..46: mol_type = other DNA
cgcctttttgggtgcctgtcgtccacacaacatacgagagtttttt

SEQ ID NO: 80 - DNA, 39 bp, synthetic construct
  misc_feature 1..39: note = artificial DNA sequence
  source 1..39: mol_type = other DNA
cgaccttttgataagaggtcattcatgtcaaataagcaa

SEQ ID NO: 81 - DNA, 38 bp, synthetic construct
  misc_feature 1..38: note = artificial DNA sequence
  source 1..38: mol_type = other DNA
tgctgaatagagaatctgcctgaggagtaacatgttaa

SEQ ID NO: 82 - DNA, 48 bp, synthetic construct
  misc_feature 1..48: note = artificial DNA sequence
  source 1..48: mol_type = other DNA
agtaaaatgttttttttgactggatagcgttttgctttttaaagaagt

SEQ ID NO: 83 - DNA, 40 bp, synthetic construct
  misc_feature 1..40: note = artificial DNA sequence
  source 1..40: mol_type = other DNA
ccaatactagcggattgcatcaaaaagattaagaggaagc

SEQ ID NO: 84 - DNA, 50 bp, synthetic construct
  misc_feature 1..50: note = artificial DNA sequence
  source 1..50: mol_type = other DNA
gcggaatcgtcataaatgagagatgagaaaggcattaaatttttgtgagc

SEQ ID NO: 85 - DNA, 48 bp, synthetic construct
  misc_feature 1..48: note = artificial DNA sequence
  source 1..48: mol_type = other DNA
gaatccccgtctttaccctgactattatagtctgcgattttaaaaacc

SEQ ID NO: 86 - DNA, 40 bp, synthetic construct
  misc_feature 1..40: note = artificial DNA sequence
  source 1..40: mol_type = other DNA
ctcaaatgctttaaacgataaattatatgatagtctggcc

SEQ ID NO: 87 - DNA, 48 bp, synthetic construct
  misc_feature 1..48: note = artificial DNA sequence
  source 1..48: mol_type = other DNA
agttcagaaagagcaacactatcaaattacgaaagcctttccctgtaa

SEQ ID NO: 88 - DNA, 38 bp, synthetic construct
  misc_feature 1..38: note = artificial DNA sequence
  source 1..38: mol_type = other DNA
ttttgcggagccagtaaaacaggaggccgatatcagag

SEQ ID NO: 89 - DNA, 48 bp, synthetic construct
  misc_feature 1..48: note = artificial DNA sequence
  source 1..48: mol_type = other DNA
aacaaagattgagtaacaactcgttattagactttacaaacgagaggg

SEQ ID NO: 90 - DNA, 38 bp, synthetic construct
  misc_feature 1..38: note = artificial DNA sequence
  source 1..38: mol_type = other DNA
gacaaaagagttttaaccaccagaggtttagttaggat

SEQ ID NO: 91 - DNA, 48 bp, synthetic construct
  misc_feature 1..48: note = artificial DNA sequence
  source 1..48: mol_type = other DNA
tcagagagataatttttccacaagaattgagaacatttttagtcagag

SEQ ID NO: 92 - DNA, 40 bp, synthetic construct
  misc_feature 1..40: note = artificial DNA sequence
  source 1..40: mol_type = other DNA
gttaagcctaacggaatacccaaaagaactggcatgatta

SEQ ID NO: 93 - DNA, 50 bp, synthetic construct
  misc_feature 1..50: note = artificial DNA sequence
  source 1..50: mol_type = other DNA
caataataagagcaagtccagtaaggcaggtccaccgtattttttcagga

SEQ ID NO: 94 - DNA, 48 bp, synthetic construct
  misc_feature 1..48: note = artificial DNA sequence
  source 1..48: mol_type = other DNA
aattaagcaatagggttttcccagtatattttcataacctcaggtctg

SEQ ID NO: 95 - DNA, 48 bp, synthetic construct
  misc_feature 1..48: note = artificial DNA sequence
  source 1..48: mol_type = other DNA
agcccttttttacagagagaataaaatgaaaaccgccaccaccggaac

SEQ ID NO: 96 - DNA, 39 bp, synthetic construct
  misc_feature 1..39: note = artificial DNA sequence
  source 1..39: mol_type = other DNA
ttaggcaagtgtagcggtcacgcggcggtcatgagagcc

SEQ ID NO: 97 - DNA, 48 bp, synthetic construct
  misc_feature 1..48: note = artificial DNA sequence
  source 1..48: mol_type = other DNA
tcaaaagaatagtttttccgagatagggttgtggttttttccgaaatc

SEQ ID NO: 98 - DNA, 40 bp, synthetic construct
  misc_feature 1..40: note = artificial DNA sequence
  source 1..40: mol_type = other DNA
tttgaatggctattaggagtccactttgccccataaagtg

SEQ ID NO: 99 - DNA, 41 bp, synthetic construct
  misc_feature 1..41: note = artificial DNA sequence
  source 1..41: mol_type = other DNA
attgcctgagagtctggagcaaacaataatgctgtagcgag

SEQ ID NO: 100 - DNA, 40 bp, synthetic construct
  misc_feature 1..40: note = artificial DNA sequence
  source 1..40: mol_type = other DNA
tgttgggaagggcgttttttcggtgcagggggatgtgctg

SEQ ID NO: 101 - DNA, 41 bp, synthetic construct
  misc_feature 1..41: note = artificial DNA sequence
  source 1..41: mol_type = other DNA
atgatacaggagtgtactggtaataggcgacattcaacgag

SEQ ID NO: 102 - DNA, 48 bp, synthetic construct
  misc_feature 1..48: note = artificial DNA sequence
  source 1..48: mol_type = other DNA
aagcgcagtctctgaatttaccgtaaacaatgcgcattagacgggaga

SEQ ID NO: 103 - DNA, 30 bp, synthetic construct
  misc_feature 1..30: note = artificial DNA sequence
  source 1..30: mol_type = other DNA
cgaaccacgaccagtattagagccaaccct

SEQ ID NO: 104 - DNA, 41 bp, synthetic construct
  misc_feature 1..41: note = artificial DNA sequence
  source 1..41: mol_type = other DNA
aaacatcgccattaaaaataccgaagcgccgctacaggtcc

SEQ ID NO: 105 - DNA, 48 bp, synthetic construct
  misc_feature 1..48: note = artificial DNA sequence
  source 1..48: mol_type = other DNA
cgttaatagatgaacggtaatcgtaaaactagtttgcggatggaagtt

SEQ ID NO: 106 - DNA, 50 bp, synthetic construct
  misc_feature 1..50: note = artificial DNA sequence
  source 1..50: mol_type = other DNA
taatgtgtaggtaaagattttttcaaaagggtctacaaaggctatcaggt

SEQ ID NO: 107 - DNA, 38 bp, synthetic construct
  misc_feature 1..38: note = artificial DNA sequence
  source 1..38: mol_type = other DNA
aaggcgattaagttcagcgcattaaattttacccgtcg

SEQ ID NO: 108 - DNA, 39 bp, synthetic construct
  misc_feature 1..39: note = artificial DNA sequence
  source 1..39: mol_type = other DNA
ttcaaccggcgggagggcatagtcttttgcgggatcgtc

SEQ ID NO: 109 - DNA, 32 bp, synthetic construct
  misc_feature 1..32: note = artificial DNA sequence
  source 1..32: mol_type = other DNA
gtattaagcggggtcagtgccttgagtaacag

SEQ ID NO: 110 - DNA, 50 bp, synthetic construct
  misc_feature 1..50: note = artificial DNA sequence
  source 1..50: mol_type = other DNA
gccgccgccagcattgatttttaggaggttgagcgtcatacatggctttt

SEQ ID NO: 111 - DNA, 45 bp, synthetic construct
  misc_feature 1..45: note = artificial DNA sequence
  source 1..45: mol_type = other DNA
agacgatttcagagccaacgatttagtaattctgtccagacgacg

SEQ ID NO: 112 - DNA, 39 bp, synthetic construct
  misc_feature 1..39: note = artificial DNA sequence
  source 1..39: mol_type = other DNA
aatcctcactcagagtagcagccataagagaatataaag

SEQ ID NO: 113 - DNA, 31 bp, synthetic construct
  misc_feature 1..31: note = artificial DNA sequence
  source 1..31: mol_type = other DNA
tgccacgcgtattaacaccgcctttaaagcc

SEQ ID NO: 114 - DNA, 48 bp, synthetic construct
  misc_feature 1..48: note = artificial DNA sequence
  source 1..48: mol_type = other DNA
tctaaagccagcagaagataaaacagaggtgatgcgcgtatgctttcc

SEQ ID NO: 115 - DNA, 50 bp, synthetic construct
  misc_feature 1..50: note = artificial DNA sequence
  source 1..50: mol_type = other DNA
ataaaagggacattctgtttttccaacagagagcgcgaactgatagccct

SEQ ID NO: 116 - DNA, 40 bp, synthetic construct
  misc_feature 1..40: note = artificial DNA sequence
  source 1..40: mol_type = other DNA
atacctagcctggccgagagatagtaaaaaaaaaagaacg

SEQ ID NO: 117 - DNA, 42 bp, synthetic construct
  misc_feature 1..42: note = artificial DNA sequence
  source 1..42: mol_type = other DNA
gacgacagctttccggcaccgtaacgccaaaggaaagataca

SEQ ID NO: 118 - DNA, 38 bp, synthetic construct
  misc_feature 1..38: note = artificial DNA sequence
  source 1..38: mol_type = other DNA
atttcaacaccaatattcctgtagccagctttcatcaa

SEQ ID NO: 119 - DNA, 40 bp, synthetic construct
  misc_feature 1..40: note = artificial DNA sequence
  source 1..40: mol_type = other DNA
gcgtaacgacaaactacgccaccctcagagcctaattcgc

SEQ ID NO: 120 - DNA, 48 bp, synthetic construct
  misc_feature 1..48: note = artificial DNA sequence
  source 1..48: mol_type = other DNA
ttaaaagtaaccaccagaaggaaagaaattgcggtcggtacgccagaa

SEQ ID NO: 121 - DNA, 48 bp, synthetic construct
  misc_feature 1..48: note = artificial DNA sequence
  source 1..48: mol_type = other DNA
atcgcactgaatttgtccaattctactgaccaactttctaactcacat

SEQ ID NO: 122 - DNA, 48 bp, synthetic construct
  misc_feature 1..48: note = artificial DNA sequence
  source 1..48: mol_type = other DNA
cctcagagttttgttaaaatttttattgtaaaacggtgtctggcttag

SEQ ID NO: 123 - DNA, 31 bp, synthetic construct
  misc_feature 1..31: note = artificial DNA sequence
  source 1..31: mol_type = other DNA
ttttgtcgaaaggccgcttgagccatttggg

SEQ ID NO: 124 - DNA, 46 bp, synthetic construct
  misc_feature 1..46: note = artificial DNA sequence
  source 1..46: mol_type = other DNA
attggcgctccagtagcaccattaccattagcaaggtttctttcca

SEQ ID NO: 125 - DNA, 40 bp, synthetic construct
  misc_feature 1..40: note = artificial DNA sequence
  source 1..40: mol_type = other DNA
tttgccataggctgagactcccagacatgaaaggaaatta

SEQ ID NO: 126 - DNA, 39 bp, synthetic construct
  misc_feature 1..39: note = artificial DNA sequence
  source 1..39: mol_type = other DNA
tcagctcattttttagcaaggatagtcaaatgtttacca

SEQ ID NO: 127 - DNA, 39 bp, synthetic construct
  misc_feature 1..39: note = artificial DNA sequence
  source 1..39: mol_type = other DNA
ggaacgccatcaaaaatacgccagtacttttaataaatc

SEQ ID NO: 128 - DNA, 48 bp, synthetic construct
  misc_feature 1..48: note = artificial DNA sequence
  source 1..48: mol_type = other DNA
tggtaataatcaccttgctgacgtatgaaaaagtataacgaccaccac

SEQ ID NO: 129 - DNA, 39 bp, synthetic construct
  misc_feature 1..39: note = artificial DNA sequence
  source 1..39: mol_type = other DNA
agcggggttttgctccgccacccggccttgacagggaag

SEQ ID NO: 130 - DNA, 48 bp, synthetic construct
  misc_feature 1..48: note = artificial DNA sequence
  source 1..48: mol_type = other DNA
gcccccttattatatcggtttatcaaccaatgacaaccatccaccgga

SEQ ID NO: 131 - DNA, 48 bp, synthetic construct
  misc_feature 1..48: note = artificial DNA sequence
  source 1..48: mol_type = other DNA
aactatcggccttgcgtagattttcgtgaggccattcgcctaacaaaa

SEQ ID NO: 132 - DNA, 30 bp, synthetic construct
  misc_feature 1..30: note = artificial DNA sequence
  source 1..30: mol_type = other DNA
agtaccaagtatagcccggaataggtgtat

SEQ ID NO: 133 - DNA, 40 bp, synthetic construct
  misc_feature 1..40: note = artificial DNA sequence
  source 1..40: mol_type = other DNA
agaatagaaaggaatttttaactaaaaaatctccaaaaaa

SEQ ID NO: 134 - DNA, 40 bp, synthetic construct
  misc_feature 1..40: note = artificial DNA sequence
  source 1..40: mol_type = other DNA
aatcctgattgttttttttgattataatatcaaaattatt

SEQ ID NO: 135 - DNA, 39 bp, synthetic construct
  misc_feature 1..39: note = artificial DNA sequence
  source 1..39: mol_type = other DNA
aacctacccttctgaataatggacattcgccgacggcca

SEQ ID NO: 136 - DNA, 38 bp, synthetic construct
  misc_feature 1..38: note = artificial DNA sequence
  source 1..38: mol_type = other DNA
gcacgtaaaacagagaaacctcaaatatcagtcaatag

SEQ ID NO: 137 - DNA, 39 bp, synthetic construct
  misc_feature 1..39: note = artificial DNA sequence
  source 1..39: mol_type = other DNA
aatcaatatctggtccgtctgaatgaaagcgcacgctgg

SEQ ID NO: 138 - DNA, 39 bp, synthetic construct
  misc_feature 1..39: note = artificial DNA sequence
  source 1..39: mol_type = other DNA
aaatcaacagttgaaaagggttagcatggaagtaataac

SEQ ID NO: 139 - DNA, 31 bp, synthetic construct
  misc_feature 1..31: note = artificial DNA sequence
  source 1..31: mol_type = other DNA
ataggtcatcaggaagaaacagggttgattc

SEQ ID NO: 140 - DNA, 40 bp, synthetic construct
  misc_feature 1..40: note = artificial DNA sequence
  source 1..40: mol_type = other DNA
cgttggtggattgaccgtaatgggggaattgaagccccaa

SEQ ID NO: 141 - DNA, 38 bp, synthetic construct
  misc_feature 1..38: note = artificial DNA sequence
  source 1..38: mol_type = other DNA
cctcagaaccgccaccattctgaaacagccctccagca

SEQ ID NO: 142 - DNA, 48 bp, synthetic construct
  misc_feature 1..48: note = artificial DNA sequence
  source 1..48: mol_type = other DNA
ctcagaaccaacgcctgtagcattgccgaattttctgtatgcggagtg

SEQ ID NO: 143 - DNA, 50 bp, synthetic construct
  misc_feature 1..50: note = artificial DNA sequence
  source 1..50: mol_type = other DNA
cccaataggaacccatgtagctaaacaaccaccctatctaaagccctgcc

SEQ ID NO: 144 - DNA, 32 bp, synthetic construct
  misc_feature 1..32: note = artificial DNA sequence
  source 1..32: mol_type = other DNA
tttcgtcaccagtcattttcagggatagcaag

SEQ ID NO: 145 - DNA, 39 bp, synthetic construct
  misc_feature 1..39: note = artificial DNA sequence
  source 1..39: mol_type = other DNA
ggcggataagtgccgtaattttttcgcctccctgtagcg

SEQ ID NO: 146 - DNA, 48 bp, synthetic construct
  misc_feature 1..48: note = artificial DNA sequence
  source 1..48: mol_type = other DNA
gattctccgtgggaacatatttaagaggggactagtttgaccattatc

SEQ ID NO: 147 - DNA, 48 bp, synthetic construct
  misc_feature 1..48: note = artificial DNA sequence
  source 1..48: mol_type = other DNA
aaacggcgtagaccgtgcatctgcgggcttctggtgccggtgcgcaac

SEQ ID NO: 148 - DNA, 31 bp, synthetic construct
  misc_feature 1..31: note = artificial DNA sequence
  source 1..31: mol_type = other DNA
caattcgacattatcagcaacagcgggagct

SEQ ID NO: 149 - DNA, 48 bp, synthetic construct
  misc_feature 1..48: note = artificial DNA sequence
  source 1..48: mol_type = other DNA
tttagaagattaaatcctttgcccaatagcggaattatcaatcaatat

SEQ ID NO: 150 - DNA, 46 bp, synthetic construct
  misc_feature 1..46: note = artificial DNA sequence
  source 1..46: mol_type = other DNA
tattttttttttatatcttaccatcaagattagttgctcgcaataa

SEQ ID NO: 151 - DNA, 48 bp, synthetic construct
  misc_feature 1..48: note = artificial DNA sequence
  source 1..48: mol_type = other DNA
aaaacactgcgaaacaaagtacaaccggaacgcgcgacctactaaagt

SEQ ID NO: 152 - DNA, 40 bp, synthetic construct
  misc_feature 1..40: note = artificial DNA sequence
  source 1..40: mol_type = other DNA
aaataagaaccaccctcatttttagccgccacacaaaata

SEQ ID NO: 153 - DNA, 40 bp, synthetic construct
  misc_feature 1..40: note = artificial DNA sequence
  source 1..40: mol_type = other DNA
ttcaactattagaacccttttttatatattttaaagattc

SEQ ID NO: 154 - DNA, 49 bp, synthetic construct
  misc_feature 1..49: note = artificial DNA sequence
  source 1..49: mol_type = other DNA
aaatcacatctaggaatctagaaggcttatccgcaacatatgcgccaaa

SEQ ID NO: 155 - DNA, 39 bp, synthetic construct
  misc_feature 1..39: note = artificial DNA sequence
  source 1..39: mol_type = other DNA
ctggcgaagggcctcttcgctatactttcaaaatttctt

SEQ ID NO: 156 - DNA, 40 bp, synthetic construct
  misc_feature 1..40: note = artificial DNA sequence
  source 1..40: mol_type = other DNA
tcaaagggctgagagagaggaaagaggacagattgacaag

SEQ ID NO: 157 - DNA, 43 bp, synthetic construct
  misc_feature 1..43: note = artificial DNA sequence
  source 1..43: mol_type = other DNA
tttcgcaccaagccatctttcaaacgcggtccgttttttaaat

SEQ ID NO: 158 - DNA, 55 bp, synthetic construct
  misc_feature 1..55: note = artificial DNA sequence
  source 1..55: mol_type = other DNA
taatggacttgtgttaaacgatgctgattgcgagcacataggcggccggaaccga

SEQ ID NO: 159 - DNA, 30 bp, synthetic construct
  misc_feature 1..30: note = artificial DNA sequence
  source 1..30: mol_type = other DNA
tggtcgtctcgtcgcaaagctgctcaattt

SEQ ID NO: 160 - DNA, 47 bp, synthetic construct
  misc_feature 1..47: note = artificial DNA sequence
  source 1..47: mol_type = other DNA
tctcttcagtgagctggctgaccttcatcaacccaaatcatcataag

SEQ ID NO: 161 - DNA, 56 bp, synthetic construct
  misc_feature 1..56: note = artificial DNA sequence
  source 1..56: mol_type = other DNA
tataaaccggatattcattagagtaatctgaacggtacctttaattgctaaaaccg

SEQ ID NO: 162 - DNA, 55 bp, synthetic construct
  misc_feature 1..55: note = artificial DNA sequence
  source 1..55: mol_type = other DNA
tccgccatgtttaccatgaagggtagccgcaccctcataacggaacgtgccaatt

SEQ ID NO: 163 - DNA, 38 bp, synthetic construct
  misc_feature 1..38: note = artificial DNA sequence
  source 1..38: mol_type = other DNA
cgctaccgtaatcagtacaaaaccatcgaaaccaatct

SEQ ID NO: 164 - DNA, 38 bp, synthetic construct
  misc_feature 1..38: note = artificial DNA sequence
  source 1..38: mol_type = other DNA
ttcatatgttcattaaatcagataattaccgcgcccat

SEQ ID NO: 165 - DNA, 35 bp, synthetic construct
  misc_feature 1..35: note = artificial DNA sequence
  source 1..35: mol_type = other DNA
tatacgtaatgccactacggggttatataactata

SEQ ID NO: 166 - DNA, 41 bp, synthetic construct
  misc_feature 1..41: note = artificial DNA sequence
  source 1..41: mol_type = other DNA
tcggctgtctttccttatttcatcggagaacaaatattgac

SEQ ID NO: 167 - DNA, 43 bp, synthetic construct
  misc_feature 1..43: note = artificial DNA sequence
  source 1..43: mol_type = other DNA
ccggagacaaaaatttatgcagatgacagcatccattaaacgt

SEQ ID NO: 168 - DNA, 40 bp, synthetic construct
  misc_feature 1..40: note = artificial DNA sequence
  source 1..40: mol_type = other DNA
tataccagtcaggacgttgggaagtttcggaacgagggta

SEQ ID NO: 169 - DNA, 43 bp, synthetic construct
  misc_feature 1..43: note = artificial DNA sequence
  source 1..43: mol_type = other DNA
agagggtagctatttttattcattgacgacgataagaactggt

SEQ ID NO: 170 - DNA, 39 bp, synthetic construct
  misc_feature 1..39: note = artificial DNA sequence
  source 1..39: mol_type = other DNA
gtttaccaaaaagaaacgcaaagacaccacggcaagcaa

SEQ ID NO: 171 - DNA, 48 bp, synthetic construct
  misc_feature 1..48: note = artificial DNA sequence
  source 1..48: mol_type = other DNA
ttttttaagtcctgaacatatgcgttatacaaattcttaccatttcaa

SEQ ID NO: 172 - DNA, 56 bp, synthetic construct
  misc_feature 1..56: note = artificial DNA sequence
  source 1..56: mol_type = other DNA
aatttaggaaaatcgcgcaaaagaagatgatgaaacaaacgctggtaatggttttt

SEQ ID NO: 173 - DNA, 43 bp, synthetic construct
  misc_feature 1..43: note = artificial DNA sequence
  source 1..43: mol_type = other DNA
tttttcactctgtggtgcgctagggcgctagaaaagtaagcag

SEQ ID NO: 174 - DNA, 32 bp, synthetic construct
  misc_feature 1..32: note = artificial DNA sequence
  source 1..32: mol_type = other DNA
tttttgtaaaggtttcgcgcgcctgtgttttt

SEQ ID NO: 175 - DNA, 32 bp, synthetic construct
  misc_feature 1..32: note = artificial DNA sequence
  source 1..32: mol_type = other DNA
tttttagctacaattttcaacaatagattttt

SEQ ID NO: 176 - DNA, 48 bp, synthetic construct
  misc_feature 1..48: note = artificial DNA sequence
  source 1..48: mol_type = other DNA
aaatagcagttaccagaaggaaaccgaggaaaattttgcacccttttt

SEQ ID NO: 177 - DNA, 71 bp, synthetic construct
  misc_feature 1..71: note = artificial DNA sequence
  source 1..71: mol_type = other DNA
gcagtagagtaggtagagattaggcacaatactattaattctggtcatgtacatcgacataaataattgcg

SEQ ID NO: 178 - DNA, 63 bp, synthetic construct
  misc_feature 1..63: note = artificial DNA sequence
  source 1..63: mol_type = other DNA
gcagtagagtaggtagagattaggcatcagatgtaaaacattcaggcaaaccaggcaaagcgc

SEQ ID NO: 179 - DNA, 66 bp, synthetic construct
  misc_feature 1..66: note = artificial DNA sequence
  source 1..66: mol_type = other DNA
gcagtagagtaggtagagattaggcaagagactacctttttaaatacactcgcgagctattgtgtc

SEQ ID NO: 180 - DNA, 63 bp, synthetic construct
  misc_feature 1..63: note = artificial DNA sequence
  source 1..63: mol_type = other DNA
gcagtagagtaggtagagattaggcaatgcattcaaatatattttagaccctcagcattatga

SEQ ID NO: 181 - DNA, 68 bp, synthetic construct
  misc_feature 1..68: note = artificial DNA sequence
  source 1..68: mol_type = other DNA
gcagtagagtaggtagagattaggcataccgtcgaggtgcagtttcagggattttccgtaacactgag

SEQ ID NO: 182 - DNA, 66 bp, synthetic construct
  misc_feature 1..66: note = artificial DNA sequence
  source 1..66: mol_type = other DNA
gcagtagagtaggtagagattaggcaatcataattactagaagcatgtagatagcagcgtaccgca

SEQ ID NO: 183 - DNA, 71 bp, synthetic construct
  misc_feature 1..71: note = artificial DNA sequence
  source 1..71: mol_type = other DNA
gcagtagagtaggtagagattaggcatataaccatatttaacaacgctaccgacagagccaccctcagaac

SEQ ID NO: 184 - DNA, 63 bp, synthetic construct
  misc_feature 1..63: note = artificial DNA sequence
  source 1..63: mol_type = other DNA
gcagtagagtaggtagagattaggcacttttcgtcagatggcaattctcatattcctgattat

SEQ ID NO: 185 - DNA, 66 bp, synthetic construct
  misc_feature 1..66: note = artificial DNA sequence
  source 1..66: mol_type = other DNA
gcagtagagtaggtagagattaggcattaattacatttaacacacgcaacaaagagtcagatgccg

SEQ ID NO: 186 - DNA, 91 bp, synthetic construct
  misc_feature 1..91: note = artificial DNA sequence
  source 1..91: mol_type = other DNA
gcagtagagtaggtagagattaggcattttttttttttttttttttcaatactattaattctggtcatgtacatcgacataaataattgcg

SEQ ID NO: 187 - DNA, 83 bp, synthetic construct
  misc_feature 1..83: note = artificial DNA sequence
  source 1..83: mol_type = other DNA
gcagtagagtaggtagagattaggcatttttttttttttttttttttcagatgtaaaacattcaggcaaaccaggcaaagcgc

SEQ ID NO: 188 - DNA, 86 bp, synthetic construct
  misc_feature 1..86: note = artificial DNA sequence
  source 1..86: mol_type = other DNA
gcagtagagtaggtagagattaggcattttttttttttttttttttagagactacctttttaaatacactcgcgagctattgtgtc

SEQ ID NO: 189 - DNA, 83 bp, synthetic construct
  misc_feature 1..83: note = artificial DNA sequence
  source 1..83: mol_type = other DNA
gcagtagagtaggtagagattaggcattttttttttttttttttttatgcattcaaatatattttagaccctcagcattatga

SEQ ID NO: 190 - DNA, 88 bp, synthetic construct
  misc_feature 1..88: note = artificial DNA sequence
  source 1..88: mol_type = other DNA
gcagtagagtaggtagagattaggcatttttttttttttttttttttaccgtcgaggtgcagtttcagggattttccgtaacactgag

SEQ ID NO: 191 - DNA, 86 bp, synthetic construct
  misc_feature 1..86: note = artificial DNA sequence
  source 1..86: mol_type = other DNA
gcagtagagtaggtagagattaggcattttttttttttttttttttatcataattactagaagcatgtagatagcagcgtaccgca

SEQ ID NO: 192 - DNA, 91 bp, synthetic construct
  misc_feature 1..91: note = artificial DNA sequence
  source 1..91: mol_type = other DNA
gcagtagagtaggtagagattaggcatttttttttttttttttttttataaccatatttaacaacgctaccgacagagccaccctcagaac

SEQ ID NO: 193 - DNA, 83 bp, synthetic construct
  misc_feature 1..83: note = artificial DNA sequence
  source 1..83: mol_type = other DNA
gcagtagagtaggtagagattaggcattttttttttttttttttttcttttcgtcagatggcaattctcatattcctgattat

SEQ ID NO: 194 - DNA, 86 bp, synthetic construct
  misc_feature 1..86: note = artificial DNA sequence
  source 1..86: mol_type = other DNA
gcagtagagtaggtagagattaggcattttttttttttttttttttttaattacatttaacacacgcaacaaagagtcagatgccg

SEQ ID NO: 195 - DNA, 99 bp, synthetic construct
  misc_feature 1..99: note = artificial DNA sequence
  source 1..99: mol_type = other DNA
gcagtagagtaggtagagattaggcattgcagtagagtaggtagagattaggcacaatactattaattctggtcatgtacatcgacataaataattgcg

SEQ ID NO: 196 - DNA, 91 bp, synthetic construct
  misc_feature 1..91: note = artificial DNA sequence
  source 1..91: mol_type = other DNA
gcagtagagtaggtagagattaggcattgcagtagagtaggtagagattaggcatcagatgtaaaacattcaggcaaaccaggcaaagcgc

SEQ ID NO: 197 - DNA, 94 bp, synthetic construct
  misc_feature 1..94: note = artificial DNA sequence
  source 1..94: mol_type = other DNA
gcagtagagtaggtagagattaggcattgcagtagagtaggtagagattaggcaagagactacctttttaaatacactcgcgagctattgtgtc

SEQ ID NO: 198 - DNA, 91 bp, synthetic construct
  misc_feature 1..91: note = artificial DNA sequence
  source 1..91: mol_type = other DNA
gcagtagagtaggtagagattaggcattgcagtagagtaggtagagattaggcaatgcattcaaatatattttagaccctcagcattatga

SEQ ID NO: 199 - DNA, 96 bp, synthetic construct
  misc_feature 1..96: note = artificial DNA sequence
  source 1..96: mol_type = other DNA
gcagtagagtaggtagagattaggcattgcagtagagtaggtagagattaggcataccgtcgaggtgcagtttcagggattttccgtaacactgag

SEQ ID NO: 200 - DNA, 94 bp, synthetic construct
  misc_feature 1..94: note = artificial DNA sequence
  source 1..94: mol_type = other DNA
gcagtagagtaggtagagattaggcattgcagtagagtaggtagagattaggcaatcataattactagaagcatgtagatagcagcgtaccgca

SEQ ID NO: 201 - DNA, 99 bp, synthetic construct
  misc_feature 1..99: note = artificial DNA sequence
  source 1..99: mol_type = other DNA
gcagtagagtaggtagagattaggcattgcagtagagtaggtagagattaggcatataaccatatttaacaacgctaccgacagagccaccctcagaac

SEQ ID NO: 202 - DNA, 91 bp, synthetic construct
  misc_feature 1..91: note = artificial DNA sequence
  source 1..91: mol_type = other DNA
gcagtagagtaggtagagattaggcattgcagtagagtaggtagagattaggcacttttcgtcagatggcaattctcatattcctgattat

SEQ ID NO: 203 - DNA, 94 bp, synthetic construct
  misc_feature 1..94: note = artificial DNA sequence
  source 1..94: mol_type = other DNA
gcagtagagtaggtagagattaggcattgcagtagagtaggtagagattaggcattaattacatttaacacacgcaacaaagagtcagatgccg

SEQ ID NO: 204 - DNA, 40 bp, synthetic construct
  misc_feature 1..40: note = artificial DNA sequence
  source 1..40: mol_type = other DNA
tgcggcggccgggtcagtccagcatcagctcgataacgga

SEQ ID NO: 205 - DNA, 52 bp, synthetic construct
  misc_feature 1..52: note = artificial DNA sequence
  source 1..52: mol_type = other DNA
tgcagcaagcctggggtgcctaatgagtgagctttttaactcacattaattg

SEQ ID NO: 206 - DNA, 40 bp, synthetic construct
  misc_feature 1..40: note = artificial DNA sequence
  source 1..40: mol_type = other DNA
atttcatttgaattaccttttttaagaagatgattcattt

SEQ ID NO: 207 - DNA, 48 bp, synthetic construct
  misc_feature 1..48: note = artificial DNA sequence
  source 1..48: mol_type = other DNA
ggaggtcaataacctttttttttatagtagtagtttttattaatagat

SEQ ID NO: 208 - DNA, 32 bp, synthetic construct
  misc_feature 1..32: note = artificial DNA sequence
  source 1..32: mol_type = other DNA
ctcacagtgtttctgcacaactaaaggattta

SEQ ID NO: 209 - DNA, 49 bp, synthetic construct
  misc_feature 1..49: note = artificial DNA sequence
  source 1..49: mol_type = other DNA
aaaagaattaagtactatgccgtactggtaataagttttaacttgcgta

SEQ ID NO: 210 - DNA, 51 bp, synthetic construct
  misc_feature 1..51: note = artificial DNA sequence
  source 1..51: mol_type = other DNA
tacctacattttgaaagggacgaatggctcgcttaggagcactacagcacg

SEQ ID NO: 211 - DNA, 25 bp, synthetic construct
  misc_feature 1..25: note = artificial DNA sequence
  source 1..25: mol_type = other DNA
aaatagtttgaccatcatccaataa

SEQ ID NO: 212 - DNA, 25 bp, synthetic construct
  misc_feature 1..25: note = artificial DNA sequence
  source 1..25: mol_type = other DNA
gttagaactcaaactacctgaaagc

SEQ ID NO: 213 - DNA, 32 bp, synthetic construct
  misc_feature 1..32: note = artificial DNA sequence
  source 1..32: mol_type = other DNA
tatgaccctgtaatactttataaagcctcaga

SEQ ID NO: 214 - DNA, 41 bp, synthetic construct
  misc_feature 1..41: note = artificial DNA sequence
  source 1..41: mol_type = other DNA
gcgcgaactgatagaagataatgctgaacctcaattttaaa

SEQ ID NO: 215 - DNA, 40 bp, synthetic construct
  misc_feature 1..40: note = artificial DNA sequence
  source 1..40: mol_type = other DNA
accaccagagccgttgatatttgatacaggagtgagtaaa

SEQ ID NO: 216 - DNA, 39 bp, synthetic construct
  misc_feature 1..39: note = artificial DNA sequence
  source 1..39: mol_type = other DNA
gcataaagctaaaagaagcctgtgagaaaggccgattga

SEQ ID NO: 217 - DNA, 47 bp, synthetic construct
  misc_feature 1..47: note = artificial DNA sequence
  source 1..47: mol_type = other DNA
cggaacaaagaaaccaagcccggatcaagtttccggttttgctcagt

SEQ ID NO: 218 - DNA, 45 bp, synthetic construct
  misc_feature 1..45: note = artificial DNA sequence
  source 1..45: mol_type = other DNA
cattttgtatcatcatatgggtcgaggttttttccgttcatttgc

SEQ ID NO: 219 - DNA, 44 bp, synthetic construct
  misc_feature 1..44: note = artificial DNA sequence
  source 1..44: mol_type = other DNA
aatatttgcattaaattgtttagactgtttttataggcatcgta

SEQ ID NO: 220 - DNA, 48 bp, synthetic construct
  misc_feature 1..48: note = artificial DNA sequence
  source 1..48: mol_type = other DNA
gtgtacagaccaggcgcataggctatgccactgaggcgcaaaacagct

SEQ ID NO: 221 - DNA, 39 bp, synthetic construct
  misc_feature 1..39: note = artificial DNA sequence
  source 1..39: mol_type = other DNA
cagctttcatcaacattaaatgtgagcgagtcagctcat

SEQ ID NO: 222 - DNA, 32 bp, synthetic construct
  misc_feature 1..32: note = artificial DNA sequence
  source 1..32: mol_type = other DNA
gccggaaacgtaccccggttgatatataagca

SEQ ID NO: 223 - DNA, 44 bp, synthetic construct
  misc_feature 1..44: note = artificial DNA sequence
  source 1..44: mol_type = other DNA
tactcagccctcagaacagagagataatttttccacacgccagg

SEQ ID NO: 224 - DNA, 40 bp, synthetic construct
  misc_feature 1..40: note = artificial DNA sequence
  source 1..40: mol_type = other DNA
gaggtttagtaccgccaaaacaggggggcgcgctttaaaa

SEQ ID NO: 225 - DNA, 31 bp, synthetic construct
  misc_feature 1..31: note = artificial DNA sequence
  source 1..31: mol_type = other DNA
tttttaactattttgttgctttaaattcacc

SEQ ID NO: 226 - DNA, 48 bp, synthetic construct
  misc_feature 1..48: note = artificial DNA sequence
  source 1..48: mol_type = other DNA
acagcgcccaccggaaacaatcggaaggtgccgtcgagagtatcaccg

SEQ ID NO: 227 - DNA, 47 bp, synthetic construct
  misc_feature 1..47: note = artificial DNA sequence
  source 1..47: mol_type = other DNA
gtgccagctgcattaatgaatcggccaacgccagggtggtttttctt

SEQ ID NO: 228 - DNA, 56 bp, synthetic construct
  misc_feature 1..56: note = artificial DNA sequence
  source 1..56: mol_type = other DNA
cgctttccagtcgggagttaacggtggtggttacaagagtccacaatccgccgggc

SEQ ID NO: 229 - DNA, 48 bp, synthetic construct
  misc_feature 1..48: note = artificial DNA sequence
  source 1..48: mol_type = other DNA
cctgtagccaaaaataattcgcgtaaattaaatcctttgcaacattat

SEQ ID NO: 230 - DNA, 40 bp, synthetic construct
  misc_feature 1..40: note = artificial DNA sequence
  source 1..40: mol_type = other DNA
cagaacgatcaactttaatcattgagctcaacagcttcaa

SEQ ID NO: 231 - DNA, 41 bp, synthetic construct
  misc_feature 1..41: note = artificial DNA sequence
  source 1..41: mol_type = other DNA
tcacgacgttgagcgctaatatccgcaagtcagattgaata

SEQ ID NO: 232 - DNA, 55 bp, synthetic construct
  misc_feature 1..55: note = artificial DNA sequence
  source 1..55: mol_type = other DNA
ggaatttgtgagagatcagatgatggcaattcccagaaggggggaaagtttgcca

SEQ ID NO: 233 - DNA, 40 bp, synthetic construct
  misc_feature 1..40: note = artificial DNA sequence
  source 1..40: mol_type = other DNA
acgggtaaaatacgtaggctgaccacgttaatgacggtca

SEQ ID NO: 234 - DNA, 48 bp, synthetic construct
  misc_feature 1..48: note = artificial DNA sequence
  source 1..48: mol_type = other DNA
acgaaggcgcgccgacaatgacaagctccaaaaggagcgcaatgaatt

SEQ ID NO: 235 - DNA, 48 bp, synthetic construct
  misc_feature 1..48: note = artificial DNA sequence
  source 1..48: mol_type = other DNA
agagccaccaccctcaaccctcagatagctatagctagcaaggaccat

SEQ ID NO: 236 - DNA, 46 bp, synthetic construct
  misc_feature 1..46: note = artificial DNA sequence
  source 1..46: mol_type = other DNA
tgagaatcgctttttatatttaactacctttttttttaacctccgg

SEQ ID NO: 237 - DNA, 48 bp, synthetic construct
  misc_feature 1..48: note = artificial DNA sequence
  source 1..48: mol_type = other DNA
cgcaactgcgcagagggaattaactgaacaccaaatagcaaaccgcca

SEQ ID NO: 238 - DNA, 46 bp, synthetic construct
  misc_feature 1..46: note = artificial DNA sequence
  source 1..46: mol_type = other DNA
ccagcggtgctttttggtgcccccggtattttttgggtaaaggttt

SEQ ID NO: 239 - DNA, 40 bp, synthetic construct
  misc_feature 1..40: note = artificial DNA sequence
  source 1..40: mol_type = other DNA
tgcatcagacgatccatgtaaagcggtccacgaatcatgg

SEQ ID NO: 240 - DNA, 46 bp, synthetic construct
  misc_feature 1..46: note = artificial DNA sequence
  source 1..46: mol_type = other DNA
catgaggaagtttttttccattaaataatttttcgatatattcggt

SEQ ID NO: 241 - DNA, 47 bp, synthetic construct
  misc_feature 1..47: note = artificial DNA sequence
  source 1..47: mol_type = other DNA
aatagcaagcaaatcagatatagtcaaatatatcccaatccaaagat

SEQ ID NO: 242 - DNA, 56 bp, synthetic construct
  misc_feature 1..56: note = artificial DNA sequence
  source 1..56: mol_type = other DNA
atcgtaggaatcattatataaagcgccagttaatagcagccttagacgctgagaag

SEQ ID NO: 243 - DNA, 39 bp, synthetic construct
  misc_feature 1..39: note = artificial DNA sequence
  source 1..39: mol_type = other DNA
aggcggttagaaaccaatcaatactaatttacgagcatg

SEQ ID NO: 244 - DNA, 48 bp, synthetic construct
  misc_feature 1..48: note = artificial DNA sequence
  source 1..48: mol_type = other DNA
ctgatgcattaaaattcttaccagccgcgcccgccttaaatcaagatt

SEQ ID NO: 245 - DNA, 42 bp, synthetic construct
  misc_feature 1..42: note = artificial DNA sequence
  source 1..42: mol_type = other DNA
cttaggttaacagtagggcttaatagccgtttccagctacaa

SEQ ID NO: 246 - DNA, 42 bp, synthetic construct
  misc_feature 1..42: note = artificial DNA sequence
  source 1..42: mol_type = other DNA
ctttgctcgccgggttacctgcagcgttgcgcctgagagagt

SEQ ID NO: 247 - DNA, 48 bp, synthetic construct
  misc_feature 1..48: note = artificial DNA sequence
  source 1..48: mol_type = other DNA
ttctaagaagaggacaagaggcaaccgcgacctacaacggggctatca

SEQ ID NO: 248 - DNA, 40 bp, synthetic construct
  misc_feature 1..40: note = artificial DNA sequence
  source 1..40: mol_type = other DNA
aaggcttagcgaacctcccgacttacattcaacaaacgta

SEQ ID NO: 249 - DNA, 48 bp, synthetic construct
  misc_feature 1..48: note = artificial DNA sequence
  source 1..48: mol_type = other DNA
ttgcgggaaacgagggtagcaacgagtgaatagattttaagaactggc

SEQ ID NO: 250 - DNA, 48 bp, synthetic construct
  misc_feature 1..48: note = artificial DNA sequence
  source 1..48: mol_type = other DNA
atcggctgtctttccttatcattcttaggcagtaagtcctgtgaattt

SEQ ID NO: 251 - DNA, 48 bp, synthetic construct
  misc_feature 1..48: note = artificial DNA sequence
  source 1..48: mol_type = other DNA
gtgaataaccttgctttgtaaatgaaatgaaacaaaataaaaggtggc

SEQ ID NO: 252 - DNA, 40 bp, synthetic construct
  misc_feature 1..40: note = artificial DNA sequence
  source 1..40: mol_type = other DNA
cgtcgctacaataacggattcgccctattacgccagctgg

SEQ ID NO: 253 - DNA, 52 bp, synthetic construct
  misc_feature 1..52: note = artificial DNA sequence
  source 1..52: mol_type = other DNA
ttaattaattttcccttttttagaatccttgaaaaccataggtctgagagac

SEQ ID NO: 254 - DNA, 40 bp, synthetic construct
  misc_feature 1..40: note = artificial DNA sequence
  source 1..40: mol_type = other DNA
cggtggtgctggtctggtcagcagtagctctcacggaaaa

SEQ ID NO: 255 - DNA, 52 bp, synthetic construct
  misc_feature 1..52: note = artificial DNA sequence
  source 1..52: mol_type = other DNA
ccatcccacgcaaccatttttcttacggctggaggtctgttgccctgcggct

SEQ ID NO: 256 - DNA, 48 bp, synthetic construct
  misc_feature 1..48: note = artificial DNA sequence
  source 1..48: mol_type = other DNA
agccggaagcataaaggcgcagtggaattcgtggtatgaggccgtttt

SEQ ID NO: 257 - DNA, 40 bp, synthetic construct
  misc_feature 1..40: note = artificial DNA sequence
  source 1..40: mol_type = other DNA
gaataatacagtttcagcggagtgggaacaaacggcggat

SEQ ID NO: 258 - DNA, 52 bp, synthetic construct
  misc_feature 1..52: note = artificial DNA sequence
  source 1..52: mol_type = other DNA
attttttcacgttgaatttttatctccaaaaaaaagcaaccatcgcccacgc

SEQ ID NO: 259 - DNA, 40 bp, synthetic construct
  misc_feature 1..40: note = artificial DNA sequence
  source 1..40: mol_type = other DNA
ttctgtattaggtcacgttggtgtagatgggcccaggcaa

SEQ ID NO: 260 - DNA, 40 bp, synthetic construct
  misc_feature 1..40: note = artificial DNA sequence
  source 1..40: mol_type = other DNA
tttccagatccagccatcaccagtaaacaagaggtcattg

SEQ ID NO: 261 - DNA, 48 bp, synthetic construct
  misc_feature 1..48: note = artificial DNA sequence
  source 1..48: mol_type = other DNA
gatgaatatacagtaagctgcaaggcgattaagttgggtacgaaacgt

SEQ ID NO: 262 - DNA, 40 bp, synthetic construct
  misc_feature 1..40: note = artificial DNA sequence
  source 1..40: mol_type = other DNA
acgtgccgagcggatcaaacttaaatttctgcctggcctt

SEQ ID NO: 263 - DNA, 47 bp, synthetic construct
  misc_feature 1..47: note = artificial DNA sequence
  source 1..47: mol_type = other DNA
aggcttgccctgacgagaaacaccgaaagaccacattcaactaattc

SEQ ID NO: 264 - DNA, 40 bp, synthetic construct
  misc_feature 1..40: note = artificial DNA sequence
  source 1..40: mol_type = other DNA
gatcgcaccgttagtactgtagcattccacaggcgattat

SEQ ID NO: 265 - DNA, 34 bp, synthetic construct
  misc_feature 1..34: note = artificial DNA sequence
  source 1..34: mol_type = other DNA
gctttccggtcaatcatatgtccaatactgcgga

SEQ ID NO: 266 - DNA, 44 bp, synthetic construct
  misc_feature 1..44: note = artificial DNA sequence
  source 1..44: mol_type = other DNA
gtaaaacgacggccattttttgccaagctttcaggttttcccag

SEQ ID NO: 267 - DNA, 56 bp, synthetic construct
  misc_feature 1..56: note = artificial DNA sequence
  source 1..56: mol_type = other DNA
acaaagctgctcattcgctacagagaaagattagtaagagcaatgctttcgaggtg

SEQ ID NO: 268 - DNA, 47 bp, synthetic construct
  misc_feature 1..47: note = artificial DNA sequence
  source 1..47: mol_type = other DNA
taactgattgtttggatttcagggcgatggcagcttgacagcggaat

SEQ ID NO: 269 - DNA, 44 bp, synthetic construct
  misc_feature 1..44: note = artificial DNA sequence
  source 1..44: mol_type = other DNA
tgtacatcgacataatttttaaaatcccgtaaaacgccagcagt

SEQ ID NO: 270 - DNA, 40 bp, synthetic construct
  misc_feature 1..40: note = artificial DNA sequence
  source 1..40: mol_type = other DNA
aacgccaacatgtaatcaagaacgaatcttacgaacaaga

SEQ ID NO: 271 - DNA, 44 bp, synthetic construct
  misc_feature 1..44: note = artificial DNA sequence
  source 1..44: mol_type = other DNA
aggggacgacgacagtttttatcggcctcaggaaaccgtgcatc

SEQ ID NO: 272 - DNA, 40 bp, synthetic construct
  misc_feature 1..40: note = artificial DNA sequence
  source 1..40: mol_type = other DNA
ttagacgggagaacccgaagcccttccttatttgcagcca

SEQ ID NO: 273 - DNA, 36 bp, synthetic construct
  misc_feature 1..36: note = artificial DNA sequence
  source 1..36: mol_type = other DNA
gtcggggtcattgcaggcgttttttttcgcactcta

SEQ ID NO: 274 - DNA, 48 bp, synthetic construct
  misc_feature 1..48: note = artificial DNA sequence
  source 1..48: mol_type = other DNA
gttttttccacggtcaggccagaacgcctgtgcactctgtttccacac

SEQ ID NO: 275 - DNA, 49 bp, synthetic construct
  misc_feature 1..49: note = artificial DNA sequence
  source 1..49: mol_type = other DNA
tgccgttccggcaaacctttagttcgacaactcgtagcactaaatcgga

SEQ ID NO: 276 - DNA, 54 bp, synthetic construct
  misc_feature 1..54: note = artificial DNA sequence
  source 1..54: mol_type = other DNA
aatttcttaaaacgaactaatttttggaacaacattatccagtcagtcaacgta

SEQ ID NO: 277 - DNA, 44 bp, synthetic construct
  misc_feature 1..44: note = artificial DNA sequence
  source 1..44: mol_type = other DNA
tgataccgcaacctttaattgtatcggtttttttatcagctcac

SEQ ID NO: 278 - DNA, 38 bp, synthetic construct
  misc_feature 1..38: note = artificial DNA sequence
  source 1..38: mol_type = other DNA
agatttgtaacactcatagttagcgtaattatgaaaca

SEQ ID NO: 279 - DNA, 48 bp, synthetic construct
  misc_feature 1..48: note = artificial DNA sequence
  source 1..48: mol_type = other DNA
accaagttaccaacctaaaacgaagatgaacgactgaccaactttgaa

SEQ ID NO: 280 - DNA, 54 bp, synthetic construct
  misc_feature 1..54: note = artificial DNA sequence
  source 1..54: mol_type = other DNA
agtcaatacaacgctaacgatttttcgtctttccagagttttgcacttattttc

SEQ ID NO: 281 - DNA, 44 bp, synthetic construct
  misc_feature 1..44: note = artificial DNA sequence
  source 1..44: mol_type = other DNA
aatataaaattatttgcacgtgcgatatttttcttagattatac

SEQ ID NO: 282 - DNA, 56 bp, synthetic construct
  misc_feature 1..56: note = artificial DNA sequence
  source 1..56: mol_type = other DNA
ctgtccataatggaagggttagggaacggaaccaggcggataaaattgagttaagc

SEQ ID NO: 283 - DNA, 40 bp, synthetic construct
  misc_feature 1..40: note = artificial DNA sequence
  source 1..40: mol_type = other DNA
gacgacgacaaagcccgagataggttaatgcggagaaagg

SEQ ID NO: 284 - DNA, 38 bp, synthetic construct
  misc_feature 1..38: note = artificial DNA sequence
  source 1..38: mol_type = other DNA
gttgagtaaagggcgaaaaaccgtctaataaacgtggc

SEQ ID NO: 285 - DNA, 54 bp, synthetic construct
  misc_feature 1..54: note = artificial DNA sequence
  source 1..54: mol_type = other DNA
gcggttgcctggtttgcccctttttgcaggcgaaaatcgcctggcctcactgcc

SEQ ID NO: 286 - DNA, 34 bp, synthetic construct
  misc_feature 1..34: note = artificial DNA sequence
  source 1..34: mol_type = other DNA
tgttctgcagatacataagaaagactgagaatga

SEQ ID NO: 287 - DNA, 38 bp, synthetic construct
  misc_feature 1..38: note = artificial DNA sequence
  source 1..38: mol_type = other DNA
cgccaaagacgataaaaaccaaaatagacgcagaaaac

SEQ ID NO: 288 - DNA, 40 bp, synthetic construct
  misc_feature 1..40: note = artificial DNA sequence
  source 1..40: mol_type = other DNA
caaagaacccttaagaaacgatttattaagacttttaaga

SEQ ID NO: 289 - DNA, 48 bp, synthetic construct
  misc_feature 1..48: note = artificial DNA sequence
  source 1..48: mol_type = other DNA
cctaatttcaacgctcgggttatataactatactgtaaatagagagaa

SEQ ID NO: 290 - DNA, 47 bp, synthetic construct
  misc_feature 1..47: note = artificial DNA sequence
  source 1..47: mol_type = other DNA
ttcagctaatgcagaaagtaattctgaaacagaaggattaccaccgg

SEQ ID NO: 291 - DNA, 32 bp, synthetic construct
  misc_feature 1..32: note = artificial DNA sequence
  source 1..32: mol_type = other DNA
tatgcaactaacagttgaagcgaacgaagccc

SEQ ID NO: 292 - DNA, 48 bp, synthetic construct
  misc_feature 1..48: note = artificial DNA sequence
  source 1..48: mol_type = other DNA
aaggagcgcgtaaccaccacacccacgtataaggcaaaatgtgagacg

SEQ ID NO: 293 - DNA, 48 bp, synthetic construct
  misc_feature 1..48: note = artificial DNA sequence
  source 1..48: mol_type = other DNA
catatccagaacaattttttttacgatagaacctttttttctgatcgg

SEQ ID NO: 294 - DNA, 48 bp, synthetic construct
  misc_feature 1..48: note = artificial DNA sequence
  source 1..48: mol_type = other DNA
tacaggtaggctttgacttgcagggagttaaaggaattgctatcataa

SEQ ID NO: 295 - DNA, 52 bp, synthetic construct
  misc_feature 1..52: note = artificial DNA sequence
  source 1..52: mol_type = other DNA
agaaaaatctttcatcaagagtaatcttgacatttttgaaccggatattcat

SEQ ID NO: 296 - DNA, 52 bp, synthetic construct
  misc_feature 1..52: note = artificial DNA sequence
  source 1..52: mol_type = other DNA
ttttatcctgggtattaaaccaagtaccgcactttttcatcgagaacaagca

SEQ ID NO: 297 - DNA, 32 bp, synthetic construct
  misc_feature 1..32: note = artificial DNA sequence
  source 1..32: mol_type = other DNA
ccggaatcataattacatttaatgaaactttt

SEQ ID NO: 298 - DNA, 48 bp, synthetic construct
  misc_feature 1..48: note = artificial DNA sequence
  source 1..48: mol_type = other DNA
tgtgaaattgttatccatctggtcgaaggttagtgaggcgacagacaa

SEQ ID NO: 299 - DNA, 42 bp, synthetic construct
  misc_feature 1..42: note = artificial DNA sequence
  source 1..42: mol_type = other DNA
cgctgaggggactaaagacttttttacccaaagacgttggga

SEQ ID NO: 300 - DNA, 38 bp, synthetic construct
  misc_feature 1..38: note = artificial DNA sequence
  source 1..38: mol_type = other DNA
tgataagaggtcttttttttttgcggatggtcattata

SEQ ID NO: 301 - DNA, 39 bp, synthetic construct
  misc_feature 1..39: note = artificial DNA sequence
  source 1..39: mol_type = other DNA
aatatgatgagagggtaacgcaagcaaagaattagcaaa

SEQ ID NO: 302 - DNA, 46 bp, synthetic construct
  misc_feature 1..46: note = artificial DNA sequence
  source 1..46: mol_type = other DNA
ccagcgcccggaaattcgcagtctctttttgaatttaccgttccag

SEQ ID NO: 303 - DNA, 38 bp, synthetic construct
  misc_feature 1..38: note = artificial DNA sequence
  source 1..38: mol_type = other DNA
atggtttaaacatataaaagaaacgtttttaaagacac

SEQ ID NO: 304 - DNA, 38 bp, synthetic construct
  misc_feature 1..38: note = artificial DNA sequence
  source 1..38: mol_type = other DNA
tttgtcacaatctttttatagaaaattcatagttgcta

SEQ ID NO: 305 - DNA, 48 bp, synthetic construct
  misc_feature 1..48: note = artificial DNA sequence
  source 1..48: mol_type = other DNA
ctgtttgacatcagatgtcataaacatcccttagcaccgtttaaagaa

SEQ ID NO: 306 - DNA, 39 bp, synthetic construct
  misc_feature 1..39: note = artificial DNA sequence
  source 1..39: mol_type = other DNA
ggggtcagaatgccccaaataaatctcagagccaccacc

SEQ ID NO: 307 - DNA, 51 bp, synthetic construct
  misc_feature 1..51: note = artificial DNA sequence
  source 1..51: mol_type = other DNA
tgaggccagttgctttgtaataacatcacgccccgccagcattgacaggag

SEQ ID NO: 308 - DNA, 38 bp, synthetic construct
  misc_feature 1..38: note = artificial DNA sequence
  source 1..38: mol_type = other DNA
ctgagaagattaaccgagtgccacgttttttgagagcc

SEQ ID NO: 309 - DNA, 38 bp, synthetic construct
  misc_feature 1..38: note = artificial DNA sequence
  source 1..38: mol_type = other DNA
aagggattttagtttttcaggaacggtacgccttcacc

SEQ ID NO: 310 - DNA, 38 bp, synthetic construct
  misc_feature 1..38: note = artificial DNA sequence
  source 1..38: mol_type = other DNA
agttggcaatgaaaaatctaaagcatcacctaacagag

SEQ ID NO: 311 - DNA, 38 bp, synthetic construct
  misc_feature 1..38: note = artificial DNA sequence
  source 1..38: mol_type = other DNA
cttagagctccaacaggtcaggatttttttgagagtac

SEQ ID NO: 312 - DNA, 43 bp, synthetic construct
  misc_feature 1..43: note = artificial DNA sequence
  source 1..43: mol_type = other DNA
ctttaatttagtcagaagctttttaagcggattgcataccctg

SEQ ID NO: 313 - DNA, 46 bp, synthetic construct
  misc_feature 1..46: note = artificial DNA sequence
  source 1..46: mol_type = other DNA
taatgccgattcaacctgtgtaggtaaagattcaaaaggttatttc

SEQ ID NO: 314 - DNA, 38 bp, synthetic construct
  misc_feature 1..38: note = artificial DNA sequence
  source 1..38: mol_type = other DNA
agctatttttgacagaaattgtggcgttttatccggta

SEQ ID NO: 315 - DNA, 45 bp, synthetic construct
  misc_feature 1..45: note = artificial DNA sequence
  source 1..45: mol_type = other DNA
tatgttagccggagacagtcaaatcaccatcacgcgagtcgaaat

SEQ ID NO: 316 - DNA, 43 bp, synthetic construct
  misc_feature 1..43: note = artificial DNA sequence
  source 1..43: mol_type = other DNA
cacggaataaccgaggaaatttttgcaataataacgagttacc

SEQ ID NO: 317 - DNA, 46 bp, synthetic construct
  misc_feature 1..46: note = artificial DNA sequence
  source 1..46: mol_type = other DNA
aaacagtttgccttgataagcgtcatacatggcttttgacacaaac

SEQ ID NO: 318 - DNA, 39 bp, synthetic construct
  misc_feature 1..39: note = artificial DNA sequence
  source 1..39: mol_type = other DNA
ctgcctatttcgcgcacaacatgttgggcgcgcggggag

SEQ ID NO: 319 - DNA, 41 bp, synthetic construct
  misc_feature 1..41: note = artificial DNA sequence
  source 1..41: mol_type = other DNA
gaatcagagtttttgggagctaaacaggagggcaagtgtag

SEQ ID NO: 320 - DNA, 54 bp, synthetic construct
  misc_feature 1..54: note = artificial DNA sequence
  source 1..54: mol_type = other DNA
tctaaaatatctgttgcgtccgtgtttaattgtagtaaattgggctgctcacaa

SEQ ID NO: 321 - DNA, 45 bp, synthetic construct
  misc_feature 1..45: note = artificial DNA sequence
  source 1..45: mol_type = other DNA
ttaattcgatgatatcaaaccctcaatcaattgagatggagcctc

SEQ ID NO: 322 - DNA, 46 bp, synthetic construct
  misc_feature 1..46: note = artificial DNA sequence
  source 1..46: mol_type = other DNA
aagcaaacttaattgcgtctggaaatattttaattttttgcaatgc

SEQ ID NO: 323 - DNA, 43 bp, synthetic construct
  misc_feature 1..43: note = artificial DNA sequence
  source 1..43: mol_type = other DNA
ccgctacattgttgcctgagtagagaggcagggcattttcggt

SEQ ID NO: 324 - DNA, 38 bp, synthetic construct
  misc_feature 1..38: note = artificial DNA sequence
  source 1..38: mol_type = other DNA
ggtcacgctgcgggcgctatttttggcgctatagataa

SEQ ID NO: 325 - DNA, 43 bp, synthetic construct
  misc_feature 1..43: note = artificial DNA sequence
  source 1..43: mol_type = other DNA
tcaaatatccagaacgagtagattaataccgatcgtctgaaat

SEQ ID NO: 326 - DNA, 47 bp, synthetic construct
  misc_feature 1..47: note = artificial DNA sequence
  source 1..47: mol_type = other DNA
actattatctggagcacaaactaatagcgcgaaacaaagtgctccat

SEQ ID NO: 327 - DNA, 45 bp, synthetic construct
  misc_feature 1..45: note = artificial DNA sequence
  source 1..45: mol_type = other DNA
gaatcgattctactaagctatattttcatttaagattgatcagaa

SEQ ID NO: 328 - DNA, 48 bp, synthetic construct
  misc_feature 1..48: note = artificial DNA sequence
  source 1..48: mol_type = other DNA
ccgaacaagaatacccaaaagaaccatacataacagccatgttttgaa

SEQ ID NO: 329 - DNA, 47 bp, synthetic construct
  misc_feature 1..47: note = artificial DNA sequence
  source 1..47: mol_type = other DNA
agaaggactgagactatatcaaagtaccgacaaaaggtaacgcgcct

SEQ ID NO: 330 - DNA, 45 bp, synthetic construct
  misc_feature 1..45: note = artificial DNA sequence
  source 1..45: mol_type = other DNA
gcaacgaccagtaataacgctcaaacgaaccaattagtctttaat

SEQ ID NO: 331 - DNA, 48 bp, synthetic construct
  misc_feature 1..48: note = artificial DNA sequence
  source 1..48: mol_type = other DNA
caggtctttcaaaaagattaagagcagaccgggagatttaccttatgc

SEQ ID NO: 332 - DNA, 39 bp, synthetic construct
  misc_feature 1..39: note = artificial DNA sequence
  source 1..39: mol_type = other DNA
ctagcatgcagcaagcccaatagcgaacgatctaaagtt

SEQ ID NO: 333 - DNA, 42 bp, synthetic construct
  misc_feature 1..42: note = artificial DNA sequence
  source 1..42: mol_type = other DNA
ccaataataagagcaagagcagatagaaacagggaacgtcaa

SEQ ID NO: 334 - DNA, 35 bp, synthetic construct
  misc_feature 1..35: note = artificial DNA sequence
  source 1..35: mol_type = other DNA
ttcccaattctgcgcagccctaaaacatcgccatt

SEQ ID NO: 335 - DNA, 40 bp, synthetic construct
  misc_feature 1..40: note = artificial DNA sequence
  source 1..40: mol_type = other DNA
ccctcaaataaaattcaaattgtaaacgttaatttaaaag

SEQ ID NO: 336 - DNA, 42 bp, synthetic construct
  misc_feature 1..42: note = artificial DNA sequence
  source 1..42: mol_type = other DNA
atcgtcataaatattcattcaaaaattaccagacaggaatta

SEQ ID NO: 337 - DNA, 45 bp, synthetic construct
  misc_feature 1..45: note = artificial DNA sequence
  source 1..45: mol_type = other DNA
cgatagcagcactttttgtaaaaccgcctctttttctcagaaatc

SEQ ID NO: 338 - DNA, 29 bp, synthetic construct
  misc_feature 1..29: note = artificial DNA sequence
  source 1..29: mol_type = other DNA
tcagtagcgacagaaataggtgggttgat

SEQ ID NO: 339 - DNA, 38 bp, synthetic construct
  misc_feature 1..38: note = artificial DNA sequence
  source 1..38: mol_type = other DNA
tcttttaatagcccccttattagcggcctttagcgtca

SEQ ID NO: 340 - DNA, 37 bp, synthetic construct
  misc_feature 1..37: note = artificial DNA sequence
  source 1..37: mol_type = other DNA
caggaaaaacatttacaaacaatgatgaagacgccat

SEQ ID NO: 341 - DNA, 38 bp, synthetic construct
  misc_feature 1..38: note = artificial DNA sequence
  source 1..38: mol_type = other DNA
agtcacaatttatttacattggcagacgctcatggaaa

SEQ ID NO: 342 - DNA, 38 bp, synthetic construct
  misc_feature 1..38: note = artificial DNA sequence
  source 1..38: mol_type = other DNA
catcaatgaacggtaatcgaccatgtaccgtatcatcg

SEQ ID NO: 343 - DNA, 47 bp, synthetic construct
  misc_feature 1..47: note = artificial DNA sequence
  source 1..47: mol_type = other DNA
gcaccattaccattgaaaaggtggattaagcaacggagatctacaaa

SEQ ID NO: 344 - DNA, 42 bp, synthetic construct
  misc_feature 1..42: note = artificial DNA sequence
  source 1..42: mol_type = other DNA
accagtaaaagtaaaacaatgctgaacacaccctcggcgatc

SEQ ID NO: 345 - DNA, 30 bp, synthetic construct
  misc_feature 1..30: note = artificial DNA sequence
  source 1..30: mol_type = other DNA
cagagccaggattagcggggcgcttctgaa

SEQ ID NO: 346 - DNA, 45 bp, synthetic construct
  misc_feature 1..45: note = artificial DNA sequence
  source 1..45: mol_type = other DNA
ggtcataatcaaaatctttcatcgtcagacgacgccaccagaacc

SEQ ID NO: 347 - DNA, 42 bp, synthetic construct
  misc_feature 1..42: note = artificial DNA sequence
  source 1..42: mol_type = other DNA
ccttgctaagggaagatttagccactactgattatagacttt

SEQ ID NO: 348 - DNA, 37 bp, synthetic construct
  misc_feature 1..37: note = artificial DNA sequence
  source 1..37: mol_type = other DNA
ccaacagacgccagccattgcaatttgagtccgaacg

SEQ ID NO: 349 - DNA, 35 bp, synthetic construct
  misc_feature 1..35: note = artificial DNA sequence
  source 1..35: mol_type = other DNA
cgtcaccgacttggggtcggttgtaccaaaaacat

SEQ ID NO: 350 - DNA, 42 bp, synthetic construct
  misc_feature 1..42: note = artificial DNA sequence
  source 1..42: mol_type = other DNA
acatttcccataaatgaatcccaaaagagttaaataacaacc

SEQ ID NO: 351 - DNA, 39 bp, synthetic construct
  misc_feature 1..39: note = artificial DNA sequence
  source 1..39: mol_type = other DNA
atcataccctgagagtgataaatgttacttaggaaccga

SEQ ID NO: 352 - DNA, 44 bp, synthetic construct
  misc_feature 1..44: note = artificial DNA sequence
  source 1..44: mol_type = other DNA
aggcaagggataaaaatttttagaaccttttttcatgtttcatt

SEQ ID NO: 353 - DNA, 30 bp, synthetic construct
  misc_feature 1..30: note = artificial DNA sequence
  source 1..30: mol_type = other DNA
tttgggaattagagccagcaagccgccacc

SEQ ID NO: 354 - DNA, 39 bp, synthetic construct
  misc_feature 1..39: note = artificial DNA sequence
  source 1..39: mol_type = other DNA
ctcagaattaagagggcccgtatgtttatcaatcccatc

SEQ ID NO: 355 - DNA, 44 bp, synthetic construct
  misc_feature 1..44: note = artificial DNA sequence
  source 1..44: mol_type = other DNA
ccgccacccctcattaaagccagaatgtttttaaagattcatta

SEQ ID NO: 356 - DNA, 47 bp, synthetic construct
  misc_feature 1..47: note = artificial DNA sequence
  source 1..47: mol_type = other DNA
gtaagaaagccgtcagttgaaagcccgggtagtttcctgaacatacg

SEQ ID NO: 357 - DNA, 43 bp, synthetic construct
  misc_feature 1..43: note = artificial DNA sequence
  source 1..43: mol_type = other DNA
tatttttattctgggaagtattagacgttatgctgatcgtgcc

SEQ ID NO: 358 - DNA, 40 bp, synthetic construct
  misc_feature 1..40: note = artificial DNA sequence
  source 1..40: mol_type = other DNA
ctgagtaagttctagcgctcctttatcataaggccggaac

SEQ ID NO: 359 - DNA, 38 bp, synthetic construct
  misc_feature 1..38: note = artificial DNA sequence
  source 1..38: mol_type = other DNA
aaggtgaaaatattgaaaagacaaaagggcggcgggag

SEQ ID NO: 360 - DNA, 44 bp, synthetic construct
  misc_feature 1..44: note = artificial DNA sequence
  source 1..44: mol_type = other DNA
gtcagtattaacaccgccttttttcaacttgtagcaatacttct

SEQ ID NO: 361 - DNA, 44 bp, synthetic construct
  misc_feature 1..44: note = artificial DNA sequence
  source 1..44: mol_type = other DNA
gactgtagcgcgtaccggaacctcagagcggggaacctattatt

SEQ ID NO: 362 - DNA, 31 bp, synthetic construct
  misc_feature 1..31: note = artificial DNA sequence
  source 1..31: mol_type = other DNA
ccatataaagtacggttgaatataatgctgt

SEQ ID NO: 363 - DNA, 33 bp, synthetic construct
  misc_feature 1..33: note = artificial DNA sequence
  source 1..33: mol_type = other DNA
agagtctgtccattgattagacgagcgccgcgc

SEQ ID NO: 364 - DNA, 34 bp, synthetic construct
  misc_feature 1..34: note = artificial DNA sequence
  source 1..34: mol_type = other DNA
gggagggaaggtattatcacgaaaatatggcatg

SEQ ID NO: 365 - DNA, 42 bp, synthetic construct
  misc_feature 1..42: note = artificial DNA sequence
  source 1..42: mol_type = other DNA
tcacgcaatgtttttataatcagttcaccacccttataaatc

SEQ ID NO: 366 - DNA, 48 bp, synthetic construct
  misc_feature 1..48: note = artificial DNA sequence
  source 1..48: mol_type = other DNA
agcagcaaaatcaacagccgattatcatagctccgagctctcactgcg

SEQ ID NO: 367 - DNA, 35 bp, synthetic construct
  misc_feature 1..35: note = artificial DNA sequence
  source 1..35: mol_type = other DNA
tttgtttaagcgcatatgtgaccaagttaagtact

SEQ ID NO: 368 - DNA, 49 bp, synthetic construct
  misc_feature 1..49: note = artificial DNA sequence
  source 1..49: mol_type = other DNA
ttatacatttcatcttctgacctaatagaaaaatcgcaagacaattacc

SEQ ID NO: 369 - DNA, 35 bp, synthetic construct
  misc_feature 1..35: note = artificial DNA sequence
  source 1..35: mol_type = other DNA
tgttaaataaggacccccaacagccctgagtttcg

SEQ ID NO: 370 - DNA, 38 bp, synthetic construct
  misc_feature 1..38: note = artificial DNA sequence
  source 1..38: mol_type = other DNA
attatttattttagaatccaagcctgtttagtatcatt

SEQ ID NO: 371 - DNA, 43 bp, synthetic construct
  misc_feature 1..43: note = artificial DNA sequence
  source 1..43: mol_type = other DNA
aagaatacactaaagagtttgaaataccgaccgtgtgataaat

SEQ ID NO: 372 - DNA, 38 bp, synthetic construct
  misc_feature 1..38: note = artificial DNA sequence
  source 1..38: mol_type = other DNA
tcaatatgagcaaaatggaaaccaaaatcgttgggaag

SEQ ID NO: 373 - DNA, 35 bp, synthetic construct
  misc_feature 1..35: note = artificial DNA sequence
  source 1..35: mol_type = other DNA
tacatttaacattgtcgtcagcgccatcttctggt

SEQ ID NO: 374 - DNA, 43 bp, synthetic construct
  misc_feature 1..43: note = artificial DNA sequence
  source 1..43: mol_type = other DNA
gcgaacactcatctttaataaacaaacatcaagaaaacaaaat

SEQ ID NO: 375 - DNA, 55 bp, synthetic construct
  misc_feature 1..55: note = artificial DNA sequence
  source 1..55: mol_type = other DNA
ttaattcagcaaatcaacctgtcggcaacagctgattgcccagaatccctcgtta

SEQ ID NO: 376 - DNA, 41 bp, synthetic construct
  misc_feature 1..41: note = artificial DNA sequence
  source 1..41: mol_type = other DNA
tatgccagtaataagagatcaaaatataaaaacagaaataa

SEQ ID NO: 377 - DNA, 36 bp, synthetic construct
  misc_feature 1..36: note = artificial DNA sequence
  source 1..36: mol_type = other DNA
aggtggagtaacgtcaagaaattgcgtagattaatt

SEQ ID NO: 378 - DNA, 49 bp, synthetic construct
  misc_feature 1..49: note = artificial DNA sequence
  source 1..49: mol_type = other DNA
gtaacagtaagtttataaaataatacaatagaaggcattttcgagcgtt

SEQ ID NO: 379 - DNA, 41 bp, synthetic construct
  misc_feature 1..41: note = artificial DNA sequence
  source 1..41: mol_type = other DNA
tgggcggttgatcaagttttttgtccgtgaaccaagaattt

SEQ ID NO: 380 - DNA, 49 bp, synthetic construct
  misc_feature 1..49: note = artificial DNA sequence
  source 1..49: mol_type = other DNA
accctaaagggagcccccgaaagcgaccaacgtcgttgttccgtgggct

SEQ ID NO: 381 - DNA, 47 bp, synthetic construct
  misc_feature 1..47: note = artificial DNA sequence
  source 1..47: mol_type = other DNA
tttaatgccaacggcacactggtagtttggaccgaaatccgtgcttt

SEQ ID NO: 382 - DNA, 44 bp, synthetic construct
  misc_feature 1..44: note = artificial DNA sequence
  source 1..44: mol_type = other DNA
tatattcaggttccgccacgaacctacccctcaagatgaaagta

SEQ ID NO: 383 - DNA, 36 bp, synthetic construct
  misc_feature 1..36: note = artificial DNA sequence
  source 1..36: mol_type = other DNA
aaagccgcacatcctctcgctggcagcctccgtttt

SEQ ID NO: 384 - DNA, 41 bp, synthetic construct
  misc_feature 1..41: note = artificial DNA sequence
  source 1..41: mol_type = other DNA
tgccagtttggtaatagtaaaattttagttttgcaagccat

SEQ ID NO: 385 - DNA, 42 bp, synthetic construct
  misc_feature 1..42: note = artificial DNA sequence
  source 1..42: mol_type = other DNA
tgaattaggaatacagcatcggtcgtcaccctcagcagcagt

SEQ ID NO: 386 - DNA, 52 bp, synthetic construct
  misc_feature 1..52: note = artificial DNA sequence
  source 1..52: mol_type = other DNA
ttgcgccagagcacaggcggcgcggtcctacatttgtagattagtacgtggc

SEQ ID NO: 387 - DNA, 36 bp, synthetic construct
  misc_feature 1..36: note = artificial DNA sequence
  source 1..36: mol_type = other DNA
tacgggtgctgctaccggggtgaggatcgaattgag

SEQ ID NO: 388 - DNA, 39 bp, synthetic construct
  misc_feature 1..39: note = artificial DNA sequence
  source 1..39: mol_type = other DNA
ttaagaacaactaaaggccgcttcgaggcatcatcagtt

SEQ ID NO: 389 - DNA, 72 bp, synthetic construct
  misc_feature 1..72: note = artificial DNA sequence
  source 1..72: mol_type = other DNA
gcagtagagtaggtagagattaggcaagagacgtttttagaaacgacttgtagaatttttgtcagcgtggtg

SEQ ID NO: 390 - DNA, 72 bp, synthetic construct
  misc_feature 1..72: note = artificial DNA sequence
  source 1..72: mol_type = other DNA
gcagtagagtaggtagagattaggcacgaaaggtttttggatgtcagtacctttttttttcatcgggagaaa

SEQ ID NO: 391 - DNA, 66 bp, synthetic construct
  misc_feature 1..66: note = artificial DNA sequence
  source 1..66: mol_type = other DNA
gcagtagagtaggtagagattaggcacgtcggattctccgtgagaatagacagaggggccctcgtt

SEQ ID NO: 392 - DNA, 66 bp, synthetic construct
  misc_feature 1..66: note = artificial DNA sequence
  source 1..66: mol_type = other DNA
gcagtagagtaggtagagattaggcactccgtggtgaagggacaaccgcatcacccaacgtggact

SEQ ID NO: 393 - DNA, 64 bp, synthetic construct
  misc_feature 1..64: note = artificial DNA sequence
  source 1..64: mol_type = other DNA
gcagtagagtaggtagagattaggcaataagtatatcaatataatccctatgtttaccagtccc

SEQ ID NO: 394 - DNA, 66 bp, synthetic construct
  misc_feature 1..66: note = artificial DNA sequence
  source 1..66: mol_type = other DNA
gcagtagagtaggtagagattaggcattattaatcaataggaggtaaagttaacgagaggcttttg

SEQ ID NO: 395 - DNA, 72 bp, synthetic construct
  misc_feature 1..72: note = artificial DNA sequence
  source 1..72: mol_type = other DNA
gcagtagagtaggtagagattaggcatgaccgttttttatgggagggattttgcttttttaacaactttcaa

SEQ ID NO: 396 - DNA, 66 bp, synthetic construct
  misc_feature 1..66: note = artificial DNA sequence
  source 1..66: mol_type = other DNA
gcagtagagtaggtagagattaggcaggtgcgggcctcttcgtgattgctgggtaatttaacataa

SEQ ID NO: 397 - DNA, 64 bp, synthetic construct
  misc_feature 1..64: note = artificial DNA sequence
  source 1..64: mol_type = other DNA
gcagtagagtaggtagagattaggcaaagccccattttcagggataccgtcgccattcaggctg

SEQ ID NO: 398 - DNA, 92 bp, synthetic construct
  misc_feature 1..92: note = artificial DNA sequence
  source 1..92: mol_type = other DNA
gcagtagagtaggtagagattaggcattttttttttttttttttttagagacgtttttagaaacgacttgtagaatttttgtcagcgtggtg

SEQ ID NO: 399 - DNA, 92 bp, synthetic construct
  misc_feature 1..92: note = artificial DNA sequence
  source 1..92: mol_type = other DNA
gcagtagagtaggtagagattaggcattttttttttttttttttttcgaaaggtttttggatgtcagtacctttttttttcatcgggagaaa

SEQ ID NO: 400 - DNA, 86 bp, synthetic construct
  misc_feature 1..86: note = artificial DNA sequence
  source 1..86: mol_type = other DNA
gcagtagagtaggtagagattaggcattttttttttttttttttttcgtcggattctccgtgagaatagacagaggggccctcgtt

SEQ ID NO: 401 - DNA, 86 bp, synthetic construct
  misc_feature 1..86: note = artificial DNA sequence
  source 1..86: mol_type = other DNA
gcagtagagtaggtagagattaggcattttttttttttttttttttctccgtggtgaagggacaaccgcatcacccaacgtggact

SEQ ID NO: 402 - DNA, 84 bp, synthetic construct
  misc_feature 1..84: note = artificial DNA sequence
  source 1..84: mol_type = other DNA
gcagtagagtaggtagagattaggcattttttttttttttttttttataagtatatcaatataatccctatgtttaccagtccc

SEQ ID NO: 403 - DNA, 86 bp, synthetic construct
  misc_feature 1..86: note = artificial DNA sequence
  source 1..86: mol_type = other DNA
gcagtagagtaggtagagattaggcattttttttttttttttttttttattaatcaataggaggtaaagttaacgagaggcttttg

SEQ ID NO: 404 - DNA, 92 bp, synthetic construct
  misc_feature 1..92: note = artificial DNA sequence
  source 1..92: mol_type = other DNA
gcagtagagtaggtagagattaggcatttttttttttttttttttttgaccgttttttatgggagggattttgcttttttaacaactttcaa

SEQ ID NO: 405 - DNA, 86 bp, synthetic construct
  misc_feature 1..86: note = artificial DNA sequence
  source 1..86: mol_type = other DNA
gcagtagagtaggtagagattaggcattttttttttttttttttttggtgcgggcctcttcgtgattgctgggtaatttaacataa

SEQ ID NO: 406 - DNA, 84 bp, synthetic construct
  misc_feature 1..84: note = artificial DNA sequence
  source 1..84: mol_type = other DNA
gcagtagagtaggtagagattaggcattttttttttttttttttttaagccccattttcagggataccgtcgccattcaggctg

SEQ ID NO: 407 - DNA, 100 bp, synthetic construct
  misc_feature 1..100: note = artificial DNA sequence
  source 1..100: mol_type = other DNA
gcagtagagtaggtagagattaggcattgcagtagagtaggtagagattaggcaagagacgtttttagaaacgacttgtagaatttttgtcagcgtggtg

SEQ ID NO: 408 - DNA, 100 bp, synthetic construct
  misc_feature 1..100: note = artificial DNA sequence
  source 1..100: mol_type = other DNA
gcagtagagtaggtagagattaggcattgcagtagagtaggtagagattaggcacgaaaggtttttggatgtcagtacctttttttttcatcgggagaaa

SEQ ID NO: 409 - DNA, 94 bp, synthetic construct
  misc_feature 1..94: note = artificial DNA sequence
  source 1..94: mol_type = other DNA
gcagtagagtaggtagagattaggcattgcagtagagtaggtagagattaggcacgtcggattctccgtgagaatagacagaggggccctcgtt

SEQ ID NO: 410 - DNA, 94 bp, synthetic construct
  misc_feature 1..94: note = artificial DNA sequence
  source 1..94: mol_type = other DNA
gcagtagagtaggtagagattaggcattgcagtagagtaggtagagattaggcactccgtggtgaagggacaaccgcatcacccaacgtggact

SEQ ID NO: 411 - DNA, 92 bp, synthetic construct
  misc_feature 1..92: note = artificial DNA sequence
  source 1..92: mol_type = other DNA
gcagtagagtaggtagagattaggcattgcagtagagtaggtagagattaggcaataagtatatcaatataatccctatgtttaccagtccc

SEQ ID NO: 412 - DNA, 94 bp, synthetic construct
  misc_feature 1..94: note = artificial DNA sequence
  source 1..94: mol_type = other DNA
gcagtagagtaggtagagattaggcattgcagtagagtaggtagagattaggcattattaatcaataggaggtaaagttaacgagaggcttttg

SEQ ID NO: 413 - DNA, 100 bp, synthetic construct
  misc_feature 1..100: note = artificial DNA sequence
  source 1..100: mol_type = other DNA
gcagtagagtaggtagagattaggcattgcagtagagtaggtagagattaggcatgaccgttttttatgggagggattttgcttttttaacaactttcaa

SEQ ID NO: 414 - DNA, 94 bp, synthetic construct
  misc_feature 1..94: note = artificial DNA sequence
  source 1..94: mol_type = other DNA
gcagtagagtaggtagagattaggcattgcagtagagtaggtagagattaggcaggtgcgggcctcttcgtgattgctgggtaatttaacataa

SEQ ID NO: 415 - DNA, 92 bp, synthetic construct
  misc_feature 1..92: note = artificial DNA sequence
  source 1..92: mol_type = other DNA
gcagtagagtaggtagagattaggcattgcagtagagtaggtagagattaggcaaagccccattttcagggataccgtcgccattcaggctg

SEQ ID NO: 416 - DNA, 48 bp, synthetic construct
  misc_feature 1..48: note = artificial DNA sequence
  source 1..48: mol_type = other DNA
gcaaagacaaggtggcaacatatatggtgatggtggttccgaatagcc

SEQ ID NO: 417 - DNA, 41 bp, synthetic construct
  misc_feature 1..41: note = artificial DNA sequence
  source 1..41: mol_type = other DNA
ttccattataaattgggtcaggacacaggtagaggtcttta

SEQ ID NO: 418 - DNA, 32 bp, synthetic construct
  misc_feature 1..32: note = artificial DNA sequence
  source 1..32: mol_type = other DNA
atgcgccgctacagggaacgtgctggaggccg

SEQ ID NO: 419 - DNA, 32 bp, synthetic construct
  misc_feature 1..32: note = artificial DNA sequence
  source 1..32: mol_type = other DNA
tctcacggtacatcgacatggagagggtagct

SEQ ID NO: 420 - DNA, 40 bp, synthetic construct
  misc_feature 1..40: note = artificial DNA sequence
  source 1..40: mol_type = other DNA
gggatagcggaacgcctctggagcaaacaagaaaaggccg

SEQ ID NO: 421 - DNA, 32 bp, synthetic construct
  misc_feature 1..32: note = artificial DNA sequence
  source 1..32: mol_type = other DNA
agagagaaattgagttaagcccaagagataac

SEQ ID NO: 422 - DNA, 28 bp, synthetic construct
  misc_feature 1..28: note = artificial DNA sequence
  source 1..28: mol_type = other DNA
tttttcaaaatttaagacgctaattttc

SEQ ID NO: 423 - DNA, 40 bp, synthetic construct
  misc_feature 1..40: note = artificial DNA sequence
  source 1..40: mol_type = other DNA
cctgactattatagtcagcttcaatgaattaccaacagtt

SEQ ID NO: 424 - DNA, 42 bp, synthetic construct
  misc_feature 1..42: note = artificial DNA sequence
  source 1..42: mol_type = other DNA
cggaacaagatttacaccagaaacaaagaaaacgaaagcgcg

SEQ ID NO: 425 - DNA, 44 bp, synthetic construct
  misc_feature 1..44: note = artificial DNA sequence
  source 1..44: mol_type = other DNA
cggtgccctcgttaacggcatcaccacgggacagcggtttgtta

SEQ ID NO: 426 - DNA, 35 bp, synthetic construct
  misc_feature 1..35: note = artificial DNA sequence
  source 1..35: mol_type = other DNA
gcggtgctgtcactcgggcgcccagcatccgccag

SEQ ID NO: 427 - DNA, 48 bp, synthetic construct
  misc_feature 1..48: note = artificial DNA sequence
  source 1..48: mol_type = other DNA
aacaacatgttcagctcgagcatgtttttaaccaaatatcctaaagca

SEQ ID NO: 428 - DNA, 31 bp, synthetic construct
  misc_feature 1..31: note = artificial DNA sequence
  source 1..31: mol_type = other DNA
tctgacctaatatatttgcaaatccaatcgc

SEQ ID NO: 429 - DNA, 41 bp, synthetic construct
  misc_feature 1..41: note = artificial DNA sequence
  source 1..41: mol_type = other DNA
gaaatacaaatgctttaaaagattaagaggcgcgagaaaac

SEQ ID NO: 430 - DNA, 38 bp, synthetic construct
  misc_feature 1..38: note = artificial DNA sequence
  source 1..38: mol_type = other DNA
atcagttgacattattgttgggaagaaaaatgggagtt

SEQ ID NO: 431 - DNA, 48 bp, synthetic construct
  misc_feature 1..48: note = artificial DNA sequence
  source 1..48: mol_type = other DNA
ggaataccacatttacgagccggaacctgtcgtgccaaaacgaactaa

SEQ ID NO: 432 - DNA, 48 bp, synthetic construct
  misc_feature 1..48: note = artificial DNA sequence
  source 1..48: mol_type = other DNA
gcgcgcctgtgcaaataagagaataacaatagataagacctgcagcca

SEQ ID NO: 433 - DNA, 47 bp, synthetic construct
  misc_feature 1..47: note = artificial DNA sequence
  source 1..47: mol_type = other DNA
aaataaggcgttatatattaattgagaagagaacctaccacaaagaa

SEQ ID NO: 434 - DNA, 44 bp, synthetic construct
  misc_feature 1..44: note = artificial DNA sequence
  source 1..44: mol_type = other DNA
gcggaatcgagaatgaccataaatcaatttttaatcaaagattc

SEQ ID NO: 435 - DNA, 47 bp, synthetic construct
  misc_feature 1..47: note = artificial DNA sequence
  source 1..47: mol_type = other DNA
caatactttgataagagcgaaccattttctgtcagcggacgaataat

SEQ ID NO: 436 - DNA, 40 bp, synthetic construct
  misc_feature 1..40: note = artificial DNA sequence
  source 1..40: mol_type = other DNA
ttacgggaatcaacgtacgagtagaacgggtaaaaggccg

SEQ ID NO: 437 - DNA, 52 bp, synthetic construct
  misc_feature 1..52: note = artificial DNA sequence
  source 1..52: mol_type = other DNA
tgaaattggcctggggtgcctaatgagtttttgagcagacgatccagcgcag

SEQ ID NO: 438 - DNA, 39 bp, synthetic construct
  misc_feature 1..39: note = artificial DNA sequence
  source 1..39: mol_type = other DNA
tcctgtgccgcctgggtattggggggacgacgccagctt

SEQ ID NO: 439 - DNA, 44 bp, synthetic construct
  misc_feature 1..44: note = artificial DNA sequence
  source 1..44: mol_type = other DNA
catgtaataaggtaaagtaattctgtctttttagactttcatct

SEQ ID NO: 440 - DNA, 39 bp, synthetic construct
  misc_feature 1..39: note = artificial DNA sequence
  source 1..39: mol_type = other DNA
acgccaaccgcactctagaaacctgaaaaataaaccctc

SEQ ID NO: 441 - DNA, 42 bp, synthetic construct
  misc_feature 1..42: note = artificial DNA sequence
  source 1..42: mol_type = other DNA
agaataacttttttcaagaaagctttgattgctatttattta

SEQ ID NO: 442 - DNA, 47 bp, synthetic construct
  misc_feature 1..47: note = artificial DNA sequence
  source 1..47: mol_type = other DNA
acgttatacaactaagaacccatagacgttagccctcatcctttaat

SEQ ID NO: 443 - DNA, 47 bp, synthetic construct
  misc_feature 1..47: note = artificial DNA sequence
  source 1..47: mol_type = other DNA
acaaacaattcgacaactcgtatctggccaaaattatttgcacgaag

SEQ ID NO: 444 - DNA, 32 bp, synthetic construct
  misc_feature 1..32: note = artificial DNA sequence
  source 1..32: mol_type = other DNA
atacatttgaggatttagaagtatgaaagcgt

SEQ ID NO: 445 - DNA, 40 bp, synthetic construct
  misc_feature 1..40: note = artificial DNA sequence
  source 1..40: mol_type = other DNA
ttaatgcgcgaactgactaaaataaattcatcctgaacct

SEQ ID NO: 446 - DNA, 32 bp, synthetic construct
  misc_feature 1..32: note = artificial DNA sequence
  source 1..32: mol_type = other DNA
ggcgaaagggggatgtgctgcaagaaccaata

SEQ ID NO: 447 - DNA, 46 bp, synthetic construct
  misc_feature 1..46: note = artificial DNA sequence
  source 1..46: mol_type = other DNA
gtctggcctttttttctgtagccaaaggttttttatcaggtcattg

SEQ ID NO: 448 - DNA, 40 bp, synthetic construct
  misc_feature 1..40: note = artificial DNA sequence
  source 1..40: mol_type = other DNA
gctttcatcaacattagcgcaactgaatttgtggaagatc

SEQ ID NO: 449 - DNA, 47 bp, synthetic construct
  misc_feature 1..47: note = artificial DNA sequence
  source 1..47: mol_type = other DNA
gttgggtaacgccagggttttcctgataatcatcaaacttaaatctg

SEQ ID NO: 450 - DNA, 46 bp, synthetic construct
  misc_feature 1..46: note = artificial DNA sequence
  source 1..46: mol_type = other DNA
accgccaccctttttcagaaccgcacggtttttgtcagtgccttga

SEQ ID NO: 451 - DNA, 40 bp, synthetic construct
  misc_feature 1..40: note = artificial DNA sequence
  source 1..40: mol_type = other DNA
caccctcagagccaccaaatctccagcaacggacaacttt

SEQ ID NO: 452 - DNA, 40 bp, synthetic construct
  misc_feature 1..40: note = artificial DNA sequence
  source 1..40: mol_type = other DNA
atagcaagcccaatagaggaattggtgagaatagaaagga

SEQ ID NO: 453 - DNA, 46 bp, synthetic construct
  misc_feature 1..46: note = artificial DNA sequence
  source 1..46: mol_type = other DNA
ttttgaatggttttttattagtctagtatttttaagaactcaaact

SEQ ID NO: 454 - DNA, 40 bp, synthetic construct
  misc_feature 1..40: note = artificial DNA sequence
  source 1..40: mol_type = other DNA
aaaacgacgttggcaaatcaacagaatcaatatctggtca

SEQ ID NO: 455 - DNA, 32 bp, synthetic construct
  misc_feature 1..32: note = artificial DNA sequence
  source 1..32: mol_type = other DNA
cttgctttcgaggtgaatttcttatactcagg

SEQ ID NO: 456 - DNA, 48 bp, synthetic construct
  misc_feature 1..48: note = artificial DNA sequence
  source 1..48: mol_type = other DNA
aattttttcacgttgaaccctcattttgctaaatgatacaaacgcctg

SEQ ID NO: 457 - DNA, 42 bp, synthetic construct
  misc_feature 1..42: note = artificial DNA sequence
  source 1..42: mol_type = other DNA
cctgagagatcaaaaataattcgccgccagctcgccatgttt

SEQ ID NO: 458 - DNA, 47 bp, synthetic construct
  misc_feature 1..47: note = artificial DNA sequence
  source 1..47: mol_type = other DNA
tacggtgtattttatccattaccaggcgctagggcgctgcgcgctta

SEQ ID NO: 459 - DNA, 30 bp, synthetic construct
  misc_feature 1..30: note = artificial DNA sequence
  source 1..30: mol_type = other DNA
gcaaaatcttagctatatttataaccacgg

SEQ ID NO: 460 - DNA, 40 bp, synthetic construct
  misc_feature 1..40: note = artificial DNA sequence
  source 1..40: mol_type = other DNA
cgagatatccactattattttcgtctcttttttcgcgcaa

SEQ ID NO: 461 - DNA, 40 bp, synthetic construct
  misc_feature 1..40: note = artificial DNA sequence
  source 1..40: mol_type = other DNA
aaaacgctctataaaacagaaataccttagaatgaattac

SEQ ID NO: 462 - DNA, 48 bp, synthetic construct
  misc_feature 1..48: note = artificial DNA sequence
  source 1..48: mol_type = other DNA
taccgccaagaacccttctgaccttagactttaccaccagaaggagcg

SEQ ID NO: 463 - DNA, 42 bp, synthetic construct
  misc_feature 1..42: note = artificial DNA sequence
  source 1..42: mol_type = other DNA
atcggcctgtggcacagacaatataatagatacctgattatc

SEQ ID NO: 464 - DNA, 34 bp, synthetic construct
  misc_feature 1..34: note = artificial DNA sequence
  source 1..34: mol_type = other DNA
gcgcattagatcgcgcagaggcgtagataccaag

SEQ ID NO: 465 - DNA, 48 bp, synthetic construct
  misc_feature 1..48: note = artificial DNA sequence
  source 1..48: mol_type = other DNA
tttgcacccagctacagaggttttaattacataaaaattactagaaaa

SEQ ID NO: 466 - DNA, 44 bp, synthetic construct
  misc_feature 1..44: note = artificial DNA sequence
  source 1..44: mol_type = other DNA
catcaatatttttgatattcaaccgttctcgtgagagatctaca

SEQ ID NO: 467 - DNA, 42 bp, synthetic construct
  misc_feature 1..42: note = artificial DNA sequence
  source 1..42: mol_type = other DNA
taaaggtgaaaatccgcgacctgcattgataaatccgcctcc

SEQ ID NO: 468 - DNA, 41 bp, synthetic construct
  misc_feature 1..41: note = artificial DNA sequence
  source 1..41: mol_type = other DNA
ccaaaagaacaacgcggtccgttaaggattgccgtgtacca

SEQ ID NO: 469 - DNA, 40 bp, synthetic construct
  misc_feature 1..40: note = artificial DNA sequence
  source 1..40: mol_type = other DNA
gtcaaaggcagtttgggtagaacggtagggggtttctgcc

SEQ ID NO: 470 - DNA, 44 bp, synthetic construct
  misc_feature 1..44: note = artificial DNA sequence
  source 1..44: mol_type = other DNA
gacgattgtttttccttgatattcacaactggtaataagtttta

SEQ ID NO: 471 - DNA, 45 bp, synthetic construct
  misc_feature 1..45: note = artificial DNA sequence
  source 1..45: mol_type = other DNA
agttgataccattagatactccatgttatttttttagttgacgga

SEQ ID NO: 472 - DNA, 42 bp, synthetic construct
  misc_feature 1..42: note = artificial DNA sequence
  source 1..42: mol_type = other DNA
gtaacagttaccgccaccctcagatttatcaggacagcatcg

SEQ ID NO: 473 - DNA, 44 bp, synthetic construct
  misc_feature 1..44: note = artificial DNA sequence
  source 1..44: mol_type = other DNA
aatcagtgtttttggccaccgagtaaaaaaacatcacttgcctg

SEQ ID NO: 474 - DNA, 56 bp, synthetic construct
  misc_feature 1..56: note = artificial DNA sequence
  source 1..56: mol_type = other DNA
ttaacgtctttttaaaatgaagggagccccctttttatttagagcttggtttttat

SEQ ID NO: 475 - DNA, 39 bp, synthetic construct
  misc_feature 1..39: note = artificial DNA sequence
  source 1..39: mol_type = other DNA
ctcagagcataaagcttaagaaaagtaagcagatagccg

SEQ ID NO: 476 - DNA, 47 bp, synthetic construct
  misc_feature 1..47: note = artificial DNA sequence
  source 1..47: mol_type = other DNA
taatttgccagttacaaaataaaaaggagcgttagattcgcctgatt

SEQ ID NO: 477 - DNA, 47 bp, synthetic construct
  misc_feature 1..47: note = artificial DNA sequence
  source 1..47: mol_type = other DNA
gtcatagctgtgtcgaccccagcgtggctgacttacccaatagcgtc

SEQ ID NO: 478 - DNA, 39 bp, synthetic construct
  misc_feature 1..39: note = artificial DNA sequence
  source 1..39: mol_type = other DNA
ttcatcggcattttcgagcgccaaagacaaaagggcgac

SEQ ID NO: 479 - DNA, 39 bp, synthetic construct
  misc_feature 1..39: note = artificial DNA sequence
  source 1..39: mol_type = other DNA
gagaaaggacaggaacggtacgcaacaatatttttcagg

SEQ ID NO: 480 - DNA, 32 bp, synthetic construct
  misc_feature 1..32: note = artificial DNA sequence
  source 1..32: mol_type = other DNA
gtaattgaaagtttttcaagcaagaccaagta

SEQ ID NO: 481 - DNA, 44 bp, synthetic construct
  misc_feature 1..44: note = artificial DNA sequence
  source 1..44: mol_type = other DNA
acaaataactctgaatttatttttcgttccagttcaaggttgag

SEQ ID NO: 482 - DNA, 56 bp, synthetic construct
  misc_feature 1..56: note = artificial DNA sequence
  source 1..56: mol_type = other DNA
atcctatcagggcgatggcgggtaaagttaaaccggacttaacaagaggggttgag

SEQ ID NO: 483 - DNA, 39 bp, synthetic construct
  misc_feature 1..39: note = artificial DNA sequence
  source 1..39: mol_type = other DNA
ttccggcagtaaaaaaaatgccaattacggctagctgtt

SEQ ID NO: 484 - DNA, 55 bp, synthetic construct
  misc_feature 1..55: note = artificial DNA sequence
  source 1..55: mol_type = other DNA
tactcatttggggcgcgacggagatttgtattgaccaacttagtttgtcccaatt

SEQ ID NO: 485 - DNA, 44 bp, synthetic construct
  misc_feature 1..44: note = artificial DNA sequence
  source 1..44: mol_type = other DNA
ttatcaccgtcaccgtttttcttgagccatttggaattattcat

SEQ ID NO: 486 - DNA, 56 bp, synthetic construct
  misc_feature 1..56: note = artificial DNA sequence
  source 1..56: mol_type = other DNA
gaattagaagtagcgataaagccatagcagcaagtttcgtcacagacagtaaatga

SEQ ID NO: 487 - DNA, 34 bp, synthetic construct
  misc_feature 1..34: note = artificial DNA sequence
  source 1..34: mol_type = other DNA
aatcaccagtagctcaacatggaacgaggcgcag

SEQ ID NO: 488 - DNA, 56 bp, synthetic construct
  misc_feature 1..56: note = artificial DNA sequence
  source 1..56: mol_type = other DNA
ggtaaatagcgtctttccgtaatcgccagcaaaccatcgatttgcggatgctcctt

SEQ ID NO: 489 - DNA, 52 bp, synthetic construct
  misc_feature 1..52: note = artificial DNA sequence
  source 1..52: mol_type = other DNA
aaaatccctggcatgattaagactttttccttattacgcagtaacggaatac

SEQ ID NO: 490 - DNA, 42 bp, synthetic construct
  misc_feature 1..42: note = artificial DNA sequence
  source 1..42: mol_type = other DNA
attctactaaaatacacgaaaatcctgttcagcctccggcca

SEQ ID NO: 491 - DNA, 47 bp, synthetic construct
  misc_feature 1..47: note = artificial DNA sequence
  source 1..47: mol_type = other DNA
tacaagctgatgaacgtcagtgaaacacaactaatcgccaaaaggaa

SEQ ID NO: 492 - DNA, 48 bp, synthetic construct
  misc_feature 1..48: note = artificial DNA sequence
  source 1..48: mol_type = other DNA
agcgcagtatcctcatcagaatcaagtttgcccgattgagggagggaa

SEQ ID NO: 493 - DNA, 41 bp, synthetic construct
  misc_feature 1..41: note = artificial DNA sequence
  source 1..41: mol_type = other DNA
ataacggcaatttcatttccttgaacctccgaccgtgtgat

SEQ ID NO: 494 - DNA, 31 bp, synthetic construct
  misc_feature 1..31: note = artificial DNA sequence
  source 1..31: mol_type = other DNA
gtaacagtcagtacatatcgtcgctttaaca

SEQ ID NO: 495 - DNA, 52 bp, synthetic construct
  misc_feature 1..52: note = artificial DNA sequence
  source 1..52: mol_type = other DNA
aatatacacgggagaattaactgtttttacaccctgaacaaaaaacagggaa

SEQ ID NO: 496 - DNA, 49 bp, synthetic construct
  misc_feature 1..49: note = artificial DNA sequence
  source 1..49: mol_type = other DNA
agcaatacatgtgagaagtacggggaaagccggcgaaacgattttttgt

SEQ ID NO: 497 - DNA, 46 bp, synthetic construct
  misc_feature 1..46: note = artificial DNA sequence
  source 1..46: mol_type = other DNA
aataaataaatataatcctgtttttttgtttggattatatcatatt

SEQ ID NO: 498 - DNA, 40 bp, synthetic construct
  misc_feature 1..40: note = artificial DNA sequence
  source 1..40: mol_type = other DNA
attaacaccgcttctgctcatttgcagcgggggtctggtc

SEQ ID NO: 499 - DNA, 46 bp, synthetic construct
  misc_feature 1..46: note = artificial DNA sequence
  source 1..46: mol_type = other DNA
attttgatgagagatagactttttttctccgtggtgaaacgtacag

SEQ ID NO: 500 - DNA, 51 bp, synthetic construct
  misc_feature 1..51: note = artificial DNA sequence
  source 1..51: mol_type = other DNA
gaacaaaacatccaataaatctgatatttttattaatgccaaagagacagt

SEQ ID NO: 501 - DNA, 43 bp, synthetic construct
  misc_feature 1..43: note = artificial DNA sequence
  source 1..43: mol_type = other DNA
attcaactttagcgtcagtttttctgtagcgcgttgcaggtca

SEQ ID NO: 502 - DNA, 46 bp, synthetic construct
  misc_feature 1..46: note = artificial DNA sequence
  source 1..46: mol_type = other DNA
ggcttttgctacagaggctttttttgaggactaaagaccagcgaaa

SEQ ID NO: 503 - DNA, 46 bp, synthetic construct
  misc_feature 1..46: note = artificial DNA sequence
  source 1..46: mol_type = other DNA
gtaacgatccagtcacacgaccgtaacactgagcggtcccaatgaa

SEQ ID NO: 504 - DNA, 34 bp, synthetic construct
  misc_feature 1..34: note = artificial DNA sequence
  source 1..34: mol_type = other DNA
gcgctaatgcgcccaatagcacctgagcaaaaga

SEQ ID NO: 505 - DNA, 44 bp, synthetic construct
  misc_feature 1..44: note = artificial DNA sequence
  source 1..44: mol_type = other DNA
tcaccttgccgaacgaaccaccagaggacgcaaattaaccgttg

SEQ ID NO: 506 - DNA, 47 bp, synthetic construct
  misc_feature 1..47: note = artificial DNA sequence
  source 1..47: mol_type = other DNA
ccacgctgagagccaggtgaggcggtattaaccgtttttgtagggct

SEQ ID NO: 507 - DNA, 32 bp, synthetic construct
  misc_feature 1..32: note = artificial DNA sequence
  source 1..32: mol_type = other DNA
acaccggaatcatagaagttttgctgaatccc

SEQ ID NO: 508 - DNA, 43 bp, synthetic construct
  misc_feature 1..43: note = artificial DNA sequence
  source 1..43: mol_type = other DNA
atgggtaagtggtgccatctttttcacgcaaccagccggcagc

SEQ ID NO: 509 - DNA, 39 bp, synthetic construct
  misc_feature 1..39: note = artificial DNA sequence
  source 1..39: mol_type = other DNA
aaccgtgcatctgccatgggataagctgattgcaagcgg

SEQ ID NO: 510 - DNA, 48 bp, synthetic construct
  misc_feature 1..48: note = artificial DNA sequence
  source 1..48: mol_type = other DNA
cactacggggttgccctgatagctgcattaatgaatcggcctaaccga

SEQ ID NO: 511 - DNA, 43 bp, synthetic construct
  misc_feature 1..43: note = artificial DNA sequence
  source 1..43: mol_type = other DNA
aacaaagattagcaaaattttttaagcaataaagccaaatcac

SEQ ID NO: 512 - DNA, 51 bp, synthetic construct
  misc_feature 1..51: note = artificial DNA sequence
  source 1..51: mol_type = other DNA
agataaggcaccaacctctgctcatgtgtacagagcaacactatcatgagg

SEQ ID NO: 513 - DNA, 32 bp, synthetic construct
  misc_feature 1..32: note = artificial DNA sequence
  source 1..32: mol_type = other DNA
gaggaagtcactaaaacacaagcgtcatacat

SEQ ID NO: 514 - DNA, 48 bp, synthetic construct
  misc_feature 1..48: note = artificial DNA sequence
  source 1..48: mol_type = other DNA
tttttcataggtttaggcccgtataaacagttttgacaggtctttgac

SEQ ID NO: 515 - DNA, 32 bp, synthetic construct
  misc_feature 1..32: note = artificial DNA sequence
  source 1..32: mol_type = other DNA
tatgggattttcagggcaaactacggagtgta

SEQ ID NO: 516 - DNA, 39 bp, synthetic construct
  misc_feature 1..39: note = artificial DNA sequence
  source 1..39: mol_type = other DNA
ccacgcagtgccggaaaccaggctccggcaccgcttctg

SEQ ID NO: 517 - DNA, 37 bp, synthetic construct
  misc_feature 1..37: note = artificial DNA sequence
  source 1..37: mol_type = other DNA
gataccgatagttgcgccgacaaaggctgagtaatgc

SEQ ID NO: 518 - DNA, 32 bp, synthetic construct
  misc_feature 1..32: note = artificial DNA sequence
  source 1..32: mol_type = other DNA
ataatggatttaacgtcagttctttgattagt

SEQ ID NO: 519 - DNA, 40 bp, synthetic construct
  misc_feature 1..40: note = artificial DNA sequence
  source 1..40: mol_type = other DNA
acttctgaaagaatactgctggtaatatccagcagaatcc

SEQ ID NO: 520 - DNA, 52 bp, synthetic construct
  misc_feature 1..52: note = artificial DNA sequence
  source 1..52: mol_type = other DNA
agatgatggctctttaggagcactaacaactattttttagattagagccgtc

SEQ ID NO: 521 - DNA, 52 bp, synthetic construct
  misc_feature 1..52: note = artificial DNA sequence
  source 1..52: mol_type = other DNA
accagtcccggttgggaagggcgatcggtgcgtttttgcctcttcgctatta

SEQ ID NO: 522 - DNA, 52 bp, synthetic construct
  misc_feature 1..52: note = artificial DNA sequence
  source 1..52: mol_type = other DNA
gaacgagggtaaaaaaaaggctccaaaaggagtttttctttaattgtatcgg

SEQ ID NO: 523 - DNA, 39 bp, synthetic construct
  misc_feature 1..39: note = artificial DNA sequence
  source 1..39: mol_type = other DNA
gagtaacattatcattaagacaaattagattaatggttt

SEQ ID NO: 524 - DNA, 41 bp, synthetic construct
  misc_feature 1..41: note = artificial DNA sequence
  source 1..41: mol_type = other DNA
agggttagtcaatagtaatgctgattagttaagacgacaat

SEQ ID NO: 525 - DNA, 38 bp, synthetic construct
  misc_feature 1..38: note = artificial DNA sequence
  source 1..38: mol_type = other DNA
ctccggcttaggttttttgggttatataacgaattatc

SEQ ID NO: 526 - DNA, 39 bp, synthetic construct
  misc_feature 1..39: note = artificial DNA sequence
  source 1..39: mol_type = other DNA
atcccatcatcggctgaccgacaattaggcagaggcatt

SEQ ID NO: 527 - DNA, 46 bp, synthetic construct
  misc_feature 1..46: note = artificial DNA sequence
  source 1..46: mol_type = other DNA
tcagcaaacctgcatctaactcacattttttaattgcgttgcgctc

SEQ ID NO: 528 - DNA, 38 bp, synthetic construct
  misc_feature 1..38: note = artificial DNA sequence
  source 1..38: mol_type = other DNA
tggtgtgtgggtcactgttgccctgtttttggctggta

SEQ ID NO: 529 - DNA, 38 bp, synthetic construct
  misc_feature 1..38: note = artificial DNA sequence
  source 1..38: mol_type = other DNA
ttgctcgtcatatttttacatcccttacactcggcgaa

SEQ ID NO: 530 - DNA, 49 bp, synthetic construct
  misc_feature 1..49: note = artificial DNA sequence
  source 1..49: mol_type = other DNA
cggtttgcaggtttctgcactccagacagtatcggcctcatctccgtgg

SEQ ID NO: 531 - DNA, 39 bp, synthetic construct
  misc_feature 1..39: note = artificial DNA sequence
  source 1..39: mol_type = other DNA
aacgcgcgtggtttttagtgtaaattatccgctcacaat

SEQ ID NO: 532 - DNA, 38 bp, synthetic construct
  misc_feature 1..38: note = artificial DNA sequence
  source 1..38: mol_type = other DNA
ttataccagcttgagatggtttaatttttttcaacttt

SEQ ID NO: 533 - DNA, 38 bp, synthetic construct
  misc_feature 1..38: note = artificial DNA sequence
  source 1..38: mol_type = other DNA
cttatgcgattttttttaagaactggctcaaccctcag

SEQ ID NO: 534 - DNA, 39 bp, synthetic construct
  misc_feature 1..39: note = artificial DNA sequence
  source 1..39: mol_type = other DNA
atcgcgttagcaaactcagaaaacgtcataaatattcat

SEQ ID NO: 535 - DNA, 38 bp, synthetic construct
  misc_feature 1..38: note = artificial DNA sequence
  source 1..38: mol_type = other DNA
tatatgtagaatttatcaaaatcattttttggtctgag

SEQ ID NO: 536 - DNA, 43 bp, synthetic construct
  misc_feature 1..43: note = artificial DNA sequence
  source 1..43: mol_type = other DNA
agactaccgagtgaataactttttttgcttctgtaaaaatcaa

SEQ ID NO: 537 - DNA, 46 bp, synthetic construct
  misc_feature 1..46: note = artificial DNA sequence
  source 1..46: mol_type = other DNA
aatcaatactaatttaaatgcagaacgcgcctgtttatcataaagt

SEQ ID NO: 538 - DNA, 38 bp, synthetic construct
  misc_feature 1..38: note = artificial DNA sequence
  source 1..38: mol_type = other DNA
tctttccttatcgctcaacagtggccaagctacgttgt

SEQ ID NO: 539 - DNA, 38 bp, synthetic construct
  misc_feature 1..38: note = artificial DNA sequence
  source 1..38: mol_type = other DNA
ttcgcactgtttcctgaacaagaaaaataatggccagt

SEQ ID NO: 540 - DNA, 36 bp, synthetic construct
  misc_feature 1..36: note = artificial DNA sequence
  source 1..36: mol_type = other DNA
tttgaaagagttaaccctcgtttaccagacgacgat

SEQ ID NO: 541 - DNA, 46 bp, synthetic construct
  misc_feature 1..46: note = artificial DNA sequence
  source 1..46: mol_type = other DNA
cgccaggggggagaggactgcccgctttccagtcgggaaagcataa

SEQ ID NO: 542 - DNA, 39 bp, synthetic construct
  misc_feature 1..39: note = artificial DNA sequence
  source 1..39: mol_type = other DNA
cttttcaccagtggccgcatcgttatattcgaccatcgc

SEQ ID NO: 543 - DNA, 43 bp, synthetic construct
  misc_feature 1..43: note = artificial DNA sequence
  source 1..43: mol_type = other DNA
aatcattgatcttgacaagtttttaccggatattcacttcatc

SEQ ID NO: 544 - DNA, 46 bp, synthetic construct
  misc_feature 1..46: note = artificial DNA sequence
  source 1..46: mol_type = other DNA
agaccggattaattcgagaagcaaagcggattgcatcaaaacagtt

SEQ ID NO: 545 - DNA, 39 bp, synthetic construct
  misc_feature 1..39: note = artificial DNA sequence
  source 1..39: mol_type = other DNA
ccaacaggtcagatattttgtcgaaaagtttttgcccga

SEQ ID NO: 546 - DNA, 38 bp, synthetic construct
  misc_feature 1..38: note = artificial DNA sequence
  source 1..38: mol_type = other DNA
gcgatagcgaaaagcccgaaagacttcaaattaatttt

SEQ ID NO: 547 - DNA, 37 bp, synthetic construct
  misc_feature 1..37: note = artificial DNA sequence
  source 1..37: mol_type = other DNA
ggcattccaagaacgggtcagtaccatcacccaaatc

SEQ ID NO: 548 - DNA, 39 bp, synthetic construct
  misc_feature 1..39: note = artificial DNA sequence
  source 1..39: mol_type = other DNA
tcattgcaagtctctgtggtgctgcggccagaatgccat

SEQ ID NO: 549 - DNA, 32 bp, synthetic construct
  misc_feature 1..32: note = artificial DNA sequence
  source 1..32: mol_type = other DNA
ggaggtgtggttgcggacgcagaaaacggata

SEQ ID NO: 550 - DNA, 38 bp, synthetic construct
  misc_feature 1..38: note = artificial DNA sequence
  source 1..38: mol_type = other DNA
aacgattagagagtaagttagcaacgtcagagcgggag

SEQ ID NO: 551 - DNA, 47 bp, synthetic construct
  misc_feature 1..47: note = artificial DNA sequence
  source 1..47: mol_type = other DNA
tatatgtatcgagaatggggtcgcagaagataaaacagagcagcaaa

SEQ ID NO: 552 - DNA, 47 bp, synthetic construct
  misc_feature 1..47: note = artificial DNA sequence
  source 1..47: mol_type = other DNA
accgtcgccctgagatagcattacggcggattgaccgtaagtttgag

SEQ ID NO: 553 - DNA, 39 bp, synthetic construct
  misc_feature 1..39: note = artificial DNA sequence
  source 1..39: mol_type = other DNA
aagagtaaggtcattgaatggaatagcattccaccagta

SEQ ID NO: 554 - DNA, 45 bp, synthetic construct
  misc_feature 1..45: note = artificial DNA sequence
  source 1..45: mol_type = other DNA
tggcttagggtaatagccaaaatagcgagagttcattcactaaag

SEQ ID NO: 555 - DNA, 42 bp, synthetic construct
  misc_feature 1..42: note = artificial DNA sequence
  source 1..42: mol_type = other DNA
gagcacatcctcataacgaccgcaagagccgcaccagttggg

SEQ ID NO: 556 - DNA, 37 bp, synthetic construct
  misc_feature 1..37: note = artificial DNA sequence
  source 1..37: mol_type = other DNA
gcttttgcttagaatataatgctgtagcacctgaatc

SEQ ID NO: 557 - DNA, 44 bp, synthetic construct
  misc_feature 1..44: note = artificial DNA sequence
  source 1..44: mol_type = other DNA
accgaaccatcgccttcgcaaatagaaaattcatatggtttacc

SEQ ID NO: 558 - DNA, 42 bp, synthetic construct
  misc_feature 1..42: note = artificial DNA sequence
  source 1..42: mol_type = other DNA
acggtcaatcataagggagcataggcattataccaagaggca

SEQ ID NO: 559 - DNA, 40 bp, synthetic construct
  misc_feature 1..40: note = artificial DNA sequence
  source 1..40: mol_type = other DNA
acaaaattgaagccttacctcccgacttgcggctggaagt

SEQ ID NO: 560 - DNA, 42 bp, synthetic construct
  misc_feature 1..42: note = artificial DNA sequence
  source 1..42: mol_type = other DNA
agatgatgaaacaaacataatggaaaaccttttatgcgtaga

SEQ ID NO: 561 - DNA, 37 bp, synthetic construct
  misc_feature 1..37: note = artificial DNA sequence
  source 1..37: mol_type = other DNA
atgcgttatacaaatagaacgctagaaggcttatccg

SEQ ID NO: 562 - DNA, 45 bp, synthetic construct
  misc_feature 1..45: note = artificial DNA sequence
  source 1..45: mol_type = other DNA
agcacgcgtgcctttttgttcattcgtaattttttatggtggcgg

SEQ ID NO: 563 - DNA, 42 bp, synthetic construct
  misc_feature 1..42: note = artificial DNA sequence
  source 1..42: mol_type = other DNA
aaaataaaatgtttttttagactaggcatagtaagaccaggc

SEQ ID NO: 564 - DNA, 42 bp, synthetic construct
  misc_feature 1..42: note = artificial DNA sequence
  source 1..42: mol_type = other DNA
gccgtttagcagcagaacgtgcgatgctaacgtggagctatc

SEQ ID NO: 565 - DNA, 45 bp, synthetic construct
  misc_feature 1..45: note = artificial DNA sequence
  source 1..45: mol_type = other DNA
agcctgtttagtttttttcattaattgagattttttcgccaaata

SEQ ID NO: 566 - DNA, 30 bp, synthetic construct
  misc_feature 1..30: note = artificial DNA sequence
  source 1..30: mol_type = other DNA
ctcaacaattttcatcgtagcgctacgtga

SEQ ID NO: 567 - DNA, 32 bp, synthetic construct
  misc_feature 1..32: note = artificial DNA sequence
  source 1..32: mol_type = other DNA
tcacggtcatacctaaagccaacgttcgagcc

SEQ ID NO: 568 - DNA, 37 bp, synthetic construct
  misc_feature 1..37: note = artificial DNA sequence
  source 1..37: mol_type = other DNA
gggtacctccacgctggttacagaaaaggtttggtgt

SEQ ID NO: 569 - DNA, 37 bp, synthetic construct
  misc_feature 1..37: note = artificial DNA sequence
  source 1..37: mol_type = other DNA
gagctcgattcgcgtccgtgagcatcaaaagaaatcg

SEQ ID NO: 570 - DNA, 43 bp, synthetic construct
  misc_feature 1..43: note = artificial DNA sequence
  source 1..43: mol_type = other DNA
atcccctccacacataagagacgggcaacggtcacgggcatca

SEQ ID NO: 571 - DNA, 30 bp, synthetic construct
  misc_feature 1..30: note = artificial DNA sequence
  source 1..30: mol_type = other DNA
cagagggagcttaattgctacaaggccgga

SEQ ID NO: 572 - DNA, 42 bp, synthetic construct
  misc_feature 1..42: note = artificial DNA sequence
  source 1..42: mol_type = other DNA
tttttaaacaggaagattaactagcatgtcaatcatattttt

SEQ ID NO: 573 - DNA, 48 bp, synthetic construct
  misc_feature 1..48: note = artificial DNA sequence
  source 1..48: mol_type = other DNA
tttttcaatgcctgagtaatgtgtctttagtgatgaaccatggtgctg

SEQ ID NO: 574 - DNA, 42 bp, synthetic construct
  misc_feature 1..42: note = artificial DNA sequence
  source 1..42: mol_type = other DNA
tttttagcactaaatcggaaccctaaaaatagcagcctttac

SEQ ID NO: 575 - DNA, 42 bp, synthetic construct
  misc_feature 1..42: note = artificial DNA sequence
  source 1..42: mol_type = other DNA
tttttcatcgccattagagtctgtccatctgccgtaattttt

SEQ ID NO: 576 - DNA, 40 bp, synthetic construct
  misc_feature 1..40: note = artificial DNA sequence
  source 1..40: mol_type = other DNA
ttgaaaggaattgaggaaggttattagccctaaaattttt

SEQ ID NO: 577 - DNA, 56 bp, synthetic construct
  misc_feature 1..56: note = artificial DNA sequence
  source 1..56: mol_type = other DNA
ttttttgtaccccggtcagtcacgttcagaggtggagccggatgccggcaatccgc

SEQ ID NO: 578 - DNA, 54 bp, synthetic construct
  misc_feature 1..54: note = artificial DNA sequence
  source 1..54: mol_type = other DNA
gcgaaaaaccgtagataataagagcaagaaacaatgaatattttaaatgttttt

SEQ ID NO: 579 - DNA, 48 bp, synthetic construct
  misc_feature 1..48: note = artificial DNA sequence
  source 1..48: mol_type = other DNA
ttttttaaagggtgaggaatcgatcggttgtgaaaaagagtatgagcc

SEQ ID NO: 580 - DNA, 42 bp, synthetic construct
  misc_feature 1..42: note = artificial DNA sequence
  source 1..42: mol_type = other DNA
gattcaaatacttttgaaatatttaaattgtaaacgtttttt

SEQ ID NO: 581 - DNA, 50 bp, synthetic construct
  misc_feature 1..50: note = artificial DNA sequence
  source 1..50: mol_type = other DNA
gaacggtaaatcagctaaattcgcattaaattagaaaagccccaattttt

SEQ ID NO: 582 - DNA, 50 bp, synthetic construct
  misc_feature 1..50: note = artificial DNA sequence
  source 1..50: mol_type = other DNA
ttttttaatattttgttacattttttgcgattaaacctcaccggaaacaa

SEQ ID NO: 583 - DNA, 42 bp, synthetic construct
  misc_feature 1..42: note = artificial DNA sequence
  source 1..42: mol_type = other DNA
tttttcgcaaggataaaaccctcataatagcaatactccaac

SEQ ID NO: 584 - DNA, 41 bp, synthetic construct
  misc_feature 1..41: note = artificial DNA sequence
  source 1..41: mol_type = other DNA
atcgtaagtataagccgggagaagcctttatttcaattttt

SEQ ID NO: 585 - DNA, 46 bp, synthetic construct
  misc_feature 1..46: note = artificial DNA sequence
  source 1..46: mol_type = other DNA
aggcggcaggtaaaaaatagaaattttacattatgaccctgttttt

SEQ ID NO: 586 - DNA, 42 bp, synthetic construct
  misc_feature 1..42: note = artificial DNA sequence
  source 1..42: mol_type = other DNA
tttttgccaccaccctcagagccgcctctgaaacatgttttt

SEQ ID NO: 587 - DNA, 40 bp, synthetic construct
  misc_feature 1..40: note = artificial DNA sequence
  source 1..40: mol_type = other DNA
aaagcgccattcgccattcaggctaatgtgagcgattttt

SEQ ID NO: 588 - DNA, 32 bp, synthetic construct
  misc_feature 1..32: note = artificial DNA sequence
  source 1..32: mol_type = other DNA
tttttgtaacaacccgtagcatacaggttttt

SEQ ID NO: 589 - DNA, 48 bp, synthetic construct
  misc_feature 1..48: note = artificial DNA sequence
  source 1..48: mol_type = other DNA
tttttcaaggcaaagattaccagaaggaaaccgaggaaacaaagaaac

SEQ ID NO: 590 - DNA, 56 bp, synthetic construct
  misc_feature 1..56: note = artificial DNA sequence
  source 1..56: mol_type = other DNA
tttttaaagtattaagtgacaacagtcgctgaggcttgcactacgttaacgagaaa

SEQ ID NO: 591 - DNA, 48 bp, synthetic construct
  misc_feature 1..48: note = artificial DNA sequence
  source 1..48: mol_type = other DNA
caccaccctcagagagagccaccaccggaaccccttattagcgttttt

SEQ ID NO: 592 - DNA, 42 bp, synthetic construct
  misc_feature 1..42: note = artificial DNA sequence
  source 1..42: mol_type = other DNA
agagccgccataatcattgctcagtaccaggcggatattttt

SEQ ID NO: 593 - DNA, 42 bp, synthetic construct
  misc_feature 1..42: note = artificial DNA sequence
  source 1..42: mol_type = other DNA
tttttaggattaggattacctattataccagaacaaacaaag

SEQ ID NO: 594 - DNA, 48 bp, synthetic construct
  misc_feature 1..48: note = artificial DNA sequence
  source 1..48: mol_type = other DNA
tttttaccccgccacccacaatcaatggtcaataacctgtgagtagat

SEQ ID NO: 595 - DNA, 50 bp, synthetic construct
  misc_feature 1..50: note = artificial DNA sequence
  source 1..50: mol_type = other DNA
ctgcctataataggtggggttgatataagtatactcctcaagagattttt

SEQ ID NO: 596 - DNA, 45 bp, synthetic construct
  misc_feature 1..45: note = artificial DNA sequence
  source 1..45: mol_type = other DNA
aaatacgagcccggttcggaagcggggttaaatcaccggattttt

SEQ ID NO: 597 - DNA, 42 bp, synthetic construct
  misc_feature 1..42: note = artificial DNA sequence
  source 1..42: mol_type = other DNA
ttttttttgccatcttttcgccagcaaatgccccaaagaata

SEQ ID NO: 598 - DNA, 50 bp, synthetic construct
  misc_feature 1..50: note = artificial DNA sequence
  source 1..50: mol_type = other DNA
tttttagtgccgtcgagatatcaccgaacagcttcttttgcgggatcgtc

SEQ ID NO: 599 - DNA, 34 bp, synthetic construct
  misc_feature 1..34: note = artificial DNA sequence
  source 1..34: mol_type = other DNA
ttgcggaatatcaacagagatgccattgttttgt

SEQ ID NO: 600 - DNA, 35 bp, synthetic construct
  misc_feature 1..35: note = artificial DNA sequence
  source 1..35: mol_type = other DNA
aagaaatcatcggggattttagaagggaaatggtt

SEQ ID NO: 601 - DNA, 34 bp, synthetic construct
  misc_feature 1..34: note = artificial DNA sequence
  source 1..34: mol_type = other DNA
ctaaacattcctcgttagaatcaacgctgcgcgt

SEQ ID NO: 602 - DNA, 30 bp, synthetic construct
  misc_feature 1..30: note = artificial DNA sequence
  source 1..30: mol_type = other DNA
tctttccgtaccagtaataaaatacattgg

SEQ ID NO: 603 - DNA, 47 bp, synthetic construct
  misc_feature 1..47: note = artificial DNA sequence
  source 1..47: mol_type = other DNA
ctcaatcgtctgaaattacctacacaacaggaattaaaggagaaaca

SEQ ID NO: 604 - DNA, 38 bp, synthetic construct
  misc_feature 1..38: note = artificial DNA sequence
  source 1..38: mol_type = other DNA
tattcacatggaaaggattattgggacatttaaatcct

SEQ ID NO: 605 - DNA, 35 bp, synthetic construct
  misc_feature 1..35: note = artificial DNA sequence
  source 1..35: mol_type = other DNA
tccacacccgcgcaagtgtccagagccttaccaac

SEQ ID NO: 606 - DNA, 38 bp, synthetic construct
  misc_feature 1..38: note = artificial DNA sequence
  source 1..38: mol_type = other DNA
tgacgagcacgtatcgcgtactgaaagcgacagccata

SEQ ID NO: 607 - DNA, 76 bp, synthetic construct
  misc_feature 1..76: note = artificial DNA sequence
  source 1..76: mol_type = other DNA
gcagtagagtaggtagagattaggcaccacaagattaagcaaatcagatagaggcgttttttttagcgaaaatcaa

SEQ ID NO: 608 - DNA, 70 bp, synthetic construct
  misc_feature 1..70: note = artificial DNA sequence
  source 1..70: mol_type = other DNA
gcagtagagtaggtagagattaggcataatatgttagcaaacgtagaatagtaggagttgcagcccttca

SEQ ID NO: 609 - DNA, 68 bp, synthetic construct
  misc_feature 1..68: note = artificial DNA sequence
  source 1..68: mol_type = other DNA
gcagtagagtaggtagagattaggcaaataagtttattttgtctcagaaccgccaccctcagattttt

SEQ ID NO: 610 - DNA, 58 bp, synthetic construct
  misc_feature 1..58: note = artificial DNA sequence
  source 1..58: mol_type = other DNA
gcagtagagtaggtagagattaggcatcccaatccaaataagaacgtggcttacaaaa

SEQ ID NO: 611 - DNA, 65 bp, synthetic construct
  misc_feature 1..65: note = artificial DNA sequence
  source 1..65: mol_type = other DNA
gcagtagagtaggtagagattaggcactgcgaacccttataactcctcacaggtgccccagcagg

SEQ ID NO: 612 - DNA, 50 bp, synthetic construct
  misc_feature 1..50: note = artificial DNA sequence
  source 1..50: mol_type = other DNA
gcagtagagtaggtagagattaggcattaccgaagcccttttaaatcggt

SEQ ID NO: 613 - DNA, 58 bp, synthetic construct
  misc_feature 1..58: note = artificial DNA sequence
  source 1..58: mol_type = other DNA
gcagtagagtaggtagagattaggcagctaacgaccgttttaaatatgcacatataac

SEQ ID NO: 614 - DNA, 64 bp, synthetic construct
  misc_feature 1..64: note = artificial DNA sequence
  source 1..64: mol_type = other DNA
gcagtagagtaggtagagattaggcagataattattcatttttttcaataacataagtcagagg

SEQ ID NO: 615 - DNA, 65 bp, synthetic construct
  misc_feature 1..65: note = artificial DNA sequence
  source 1..65: mol_type = other DNA
gcagtagagtaggtagagattaggcatgttgttcgtattctatcttaccatcaggaatcattacc

SEQ ID NO: 616 - DNA, 96 bp, synthetic construct
  misc_feature 1..96: note = artificial DNA sequence
  source 1..96: mol_type = other DNA
gcagtagagtaggtagagattaggcattttttttttttttttttttccacaagattaagcaaatcagatagaggcgttttttttagcgaaaatcaa

SEQ ID NO: 617 - DNA, 90 bp, synthetic construct
  misc_feature 1..90: note = artificial DNA sequence
  source 1..90: mol_type = other DNA
gcagtagagtaggtagagattaggcatttttttttttttttttttttaatatgttagcaaacgtagaatagtaggagttgcagcccttca

SEQ ID NO: 618 - DNA, 88 bp, synthetic construct
  misc_feature 1..88: note = artificial DNA sequence
  source 1..88: mol_type = other DNA
gcagtagagtaggtagagattaggcattttttttttttttttttttaataagtttattttgtctcagaaccgccaccctcagattttt

SEQ ID NO: 619 - DNA, 78 bp, synthetic construct
  misc_feature 1..78: note = artificial DNA sequence
  source 1..78: mol_type = other DNA
gcagtagagtaggtagagattaggcatttttttttttttttttttttcccaatccaaataagaacgtggcttacaaaa

SEQ ID NO: 620 - DNA, 85 bp, synthetic construct
  misc_feature 1..85: note = artificial DNA sequence
  source 1..85: mol_type = other DNA
gcagtagagtaggtagagattaggcattttttttttttttttttttctgcgaacccttataactcctcacaggtgccccagcagg

SEQ ID NO: 621 - DNA, 70 bp, synthetic construct
  misc_feature 1..70: note = artificial DNA sequence
  source 1..70: mol_type = other DNA
gcagtagagtaggtagagattaggcattttttttttttttttttttttaccgaagcccttttaaatcggt

SEQ ID NO: 622 - DNA, 78 bp, synthetic construct
  misc_feature 1..78: note = artificial DNA sequence
  source 1..78: mol_type = other DNA
gcagtagagtaggtagagattaggcattttttttttttttttttttgctaacgaccgttttaaatatgcacatataac

SEQ ID NO: 623 - DNA, 84 bp, synthetic construct
  misc_feature 1..84: note = artificial DNA sequence
  source 1..84: mol_type = other DNA
gcagtagagtaggtagagattaggcattttttttttttttttttttgataattattcatttttttcaataacataagtcagagg

SEQ ID NO: 624 - DNA, 85 bp, synthetic construct
  misc_feature 1..85: note = artificial DNA sequence
  source 1..85: mol_type = other DNA
gcagtagagtaggtagagattaggcatttttttttttttttttttttgttgttcgtattctatcttaccatcaggaatcattacc

SEQ ID NO: 625 - DNA, 104 bp, synthetic construct
  misc_feature 1..104: note = artificial DNA sequence
  source 1..104: mol_type = other DNA
gcagtagagtaggtagagattaggcattgcagtagagtaggtagagattaggcaccacaagattaagcaaatcagatagaggcgttttttttagcgaaaatcaa

SEQ ID NO: 626 - DNA, 98 bp, synthetic construct
  misc_feature 1..98: note = artificial DNA sequence
  source 1..98: mol_type = other DNA
gcagtagagtaggtagagattaggcattgcagtagagtaggtagagattaggcataatatgttagcaaacgtagaatagtaggagttgcagcccttca

SEQ ID NO: 627 - DNA, 97 bp, synthetic construct
  misc_feature 1..97: note = artificial DNA sequence
  source 1..97: mol_type = other DNA
gcagtagagtaggtagagattaggcattgcagtagagtaggtagagattaggcataataagtttattttgtctcagaaccgccaccctcagattttt

SEQ ID NO: 628 - DNA, 86 bp, synthetic construct
  misc_feature 1..86: note = artificial DNA sequence
  source 1..86: mol_type = other DNA
gcagtagagtaggtagagattaggcattgcagtagagtaggtagagattaggcatcccaatccaaataagaacgtggcttacaaaa

SEQ ID NO: 629 - DNA, 93 bp, synthetic construct
  misc_feature 1..93: note = artificial DNA sequence
  source 1..93: mol_type = other DNA
gcagtagagtaggtagagattaggcattgcagtagagtaggtagagattaggcactgcgaacccttataactcctcacaggtgccccagcagg

SEQ ID NO: 630 - DNA, 78 bp, synthetic construct
  misc_feature 1..78: note = artificial DNA sequence
  source 1..78: mol_type = other DNA
gcagtagagtaggtagagattaggcattgcagtagagtaggtagagattaggcattaccgaagcccttttaaatcggt

SEQ ID NO: 631 - DNA, 86 bp, synthetic construct
  misc_feature 1..86: note = artificial DNA sequence
  source 1..86: mol_type = other DNA
gcagtagagtaggtagagattaggcattgcagtagagtaggtagagattaggcagctaacgaccgttttaaatatgcacatataac

SEQ ID NO: 632 - DNA, 92 bp, synthetic construct
  misc_feature 1..92: note = artificial DNA sequence
  source 1..92: mol_type = other DNA
gcagtagagtaggtagagattaggcattgcagtagagtaggtagagattaggcagataattattcatttttttcaataacataagtcagagg

SEQ ID NO: 633 - DNA, 93 bp, synthetic construct
  misc_feature 1..93: note = artificial DNA sequence
  source 1..93: mol_type = other DNA
gcagtagagtaggtagagattaggcattgcagtagagtaggtagagattaggcatgttgttcgtattctatcttaccatcaggaatcattacc

SEQ ID NO: 634 - DNA, 40 bp, synthetic construct
  misc_feature 1..40: note = artificial DNA sequence
  source 1..40: mol_type = other DNA
tatcagggacggggaaagcactaaagcgggagtagacagg

SEQ ID NO: 635 - DNA, 40 bp, synthetic construct
  misc_feature 1..40: note = artificial DNA sequence
  source 1..40: mol_type = other DNA
agaacgggatccggtaagcagccttaacgtcagtgagaga

SEQ ID NO: 636 - DNA, 45 bp, synthetic construct
  misc_feature 1..45: note = artificial DNA sequence
  source 1..45: mol_type = other DNA
aaagtgtctgcccgctttccagcggtgccgggggtttctgccagc

SEQ ID NO: 637 - DNA, 40 bp, synthetic construct
  misc_feature 1..40: note = artificial DNA sequence
  source 1..40: mol_type = other DNA
tattagctggtaatataatacctatcctcgttcagggcgc

SEQ ID NO: 638 - DNA, 40 bp, synthetic construct
  misc_feature 1..40: note = artificial DNA sequence
  source 1..40: mol_type = other DNA
ggaaacaatcggcgaagatagctcaagaaacacggaattt

SEQ ID NO: 639 - DNA, 40 bp, synthetic construct
  misc_feature 1..40: note = artificial DNA sequence
  source 1..40: mol_type = other DNA
aacaaaattaattacataagtataccaccctcagactcct

SEQ ID NO: 640 - DNA, 46 bp, synthetic construct
  misc_feature 1..46: note = artificial DNA sequence
  source 1..46: mol_type = other DNA
gcagaggcataacggatgagtttctccacagaccttgagcaaataa

SEQ ID NO: 641 - DNA, 40 bp, synthetic construct
  misc_feature 1..40: note = artificial DNA sequence
  source 1..40: mol_type = other DNA
ccaccctctaggtgtatcaccgtaaaacaaacttacctga

SEQ ID NO: 642 - DNA, 47 bp, synthetic construct
  misc_feature 1..47: note = artificial DNA sequence
  source 1..47: mol_type = other DNA
taacagtgcccgtataggtcagtgcagccctcataggagcgtagatt

SEQ ID NO: 643 - DNA, 46 bp, synthetic construct
  misc_feature 1..46: note = artificial DNA sequence
  source 1..46: mol_type = other DNA
catactggtaataagttttaacggaacagttacatgtacggatagc

SEQ ID NO: 644 - DNA, 40 bp, synthetic construct
  misc_feature 1..40: note = artificial DNA sequence
  source 1..40: mol_type = other DNA
ttctaagagagaaacagaattattcagagccagcccggaa

SEQ ID NO: 645 - DNA, 43 bp, synthetic construct
  misc_feature 1..43: note = artificial DNA sequence
  source 1..43: mol_type = other DNA
aataatatcgttttagcgaacctcacgatttttcttaccaacg

SEQ ID NO: 646 - DNA, 44 bp, synthetic construct
  misc_feature 1..44: note = artificial DNA sequence
  source 1..44: mol_type = other DNA
atcgtcgcgatgcaaatcctttttatcgcaagacaaagatgatg

SEQ ID NO: 647 - DNA, 43 bp, synthetic construct
  misc_feature 1..43: note = artificial DNA sequence
  source 1..43: mol_type = other DNA
agcggtgctcgggaaagatccccgacacaacagcagcaagcgg

SEQ ID NO: 648 - DNA, 40 bp, synthetic construct
  misc_feature 1..40: note = artificial DNA sequence
  source 1..40: mol_type = other DNA
aataagaaccgacttgcgggaggtaatagataagtcctga

SEQ ID NO: 649 - DNA, 40 bp, synthetic construct
  misc_feature 1..40: note = artificial DNA sequence
  source 1..40: mol_type = other DNA
caagtaccgcactcattaggaatcctcacattgtgtcact

SEQ ID NO: 650 - DNA, 56 bp, synthetic construct
  misc_feature 1..56: note = artificial DNA sequence
  source 1..56: mol_type = other DNA
ttcgcctgttcaggttttacagagcggcaataataagagctcacggaattctccgt

SEQ ID NO: 651 - DNA, 39 bp, synthetic construct
  misc_feature 1..39: note = artificial DNA sequence
  source 1..39: mol_type = other DNA
gtagaagaactcaaatctttgatcaaattaaccgttgta

SEQ ID NO: 652 - DNA, 47 bp, synthetic construct
  misc_feature 1..47: note = artificial DNA sequence
  source 1..47: mol_type = other DNA
gaatgcggcgggccgaggcggatgtgtttttcttttctgaaacatga

SEQ ID NO: 653 - DNA, 44 bp, synthetic construct
  misc_feature 1..44: note = artificial DNA sequence
  source 1..44: mol_type = other DNA
ccgcgcttaatgcgccgctaagaatcagatcggaacatccgctc

SEQ ID NO: 654 - DNA, 48 bp, synthetic construct
  misc_feature 1..48: note = artificial DNA sequence
  source 1..48: mol_type = other DNA
ccagaacaaacggtactgaggccagctcgaatgtcataccccctgcat

SEQ ID NO: 655 - DNA, 42 bp, synthetic construct
  misc_feature 1..42: note = artificial DNA sequence
  source 1..42: mol_type = other DNA
ccaagctttcagaggtggagccgccatttttgggaacggata

SEQ ID NO: 656 - DNA, 48 bp, synthetic construct
  misc_feature 1..48: note = artificial DNA sequence
  source 1..48: mol_type = other DNA
caagttactgcggccagcgcgcctgtgcactctttaacaaagcatgta

SEQ ID NO: 657 - DNA, 47 bp, synthetic construct
  misc_feature 1..47: note = artificial DNA sequence
  source 1..47: mol_type = other DNA
gcaatagctatcttacacctcacccggaaatttttttattcattaaa

SEQ ID NO: 658 - DNA, 39 bp, synthetic construct
  misc_feature 1..39: note = artificial DNA sequence
  source 1..39: mol_type = other DNA
aagtattaattagcggtcgagagggttgatatgtggtgc

SEQ ID NO: 659 - DNA, 47 bp, synthetic construct
  misc_feature 1..47: note = artificial DNA sequence
  source 1..47: mol_type = other DNA
cagacgatccagcgcaaattgcgtatggtcatagcttacaagcccaa

SEQ ID NO: 660 - DNA, 39 bp, synthetic construct
  misc_feature 1..39: note = artificial DNA sequence
  source 1..39: mol_type = other DNA
gtacataaatcaatatatgtgagtgattttttaaccttg

SEQ ID NO: 661 - DNA, 39 bp, synthetic construct
  misc_feature 1..39: note = artificial DNA sequence
  source 1..39: mol_type = other DNA
aatgagtggaagtttcctgtgtgcctgagaaacgtgctt

SEQ ID NO: 662 - DNA, 43 bp, synthetic construct
  misc_feature 1..43: note = artificial DNA sequence
  source 1..43: mol_type = other DNA
ctttcaacaatttaccgtttttttcagtaagcgtcatacatgg

SEQ ID NO: 663 - DNA, 48 bp, synthetic construct
  misc_feature 1..48: note = artificial DNA sequence
  source 1..48: mol_type = other DNA
aagtgccgggttttgctcagtaccgcaatactctatcggcataatcag

SEQ ID NO: 664 - DNA, 48 bp, synthetic construct
  misc_feature 1..48: note = artificial DNA sequence
  source 1..48: mol_type = other DNA
cagttgagcctgtcgtagagagtttacgagccccgtggtggttccgaa

SEQ ID NO: 665 - DNA, 48 bp, synthetic construct
  misc_feature 1..48: note = artificial DNA sequence
  source 1..48: mol_type = other DNA
aaaatcgcgcaagcaaatcagtaaattaccgcgcccaatagaaaccaa

SEQ ID NO: 666 - DNA, 48 bp, synthetic construct
  misc_feature 1..48: note = artificial DNA sequence
  source 1..48: mol_type = other DNA
gatgaatatgtagcatgtcaccagtacaaactgccaccctcatttcaa

SEQ ID NO: 667 - DNA, 47 bp, synthetic construct
  misc_feature 1..47: note = artificial DNA sequence
  source 1..47: mol_type = other DNA
agagccgcaagagaaggattaggagaggctgattttcagcgtaacac

SEQ ID NO: 668 - DNA, 48 bp, synthetic construct
  misc_feature 1..48: note = artificial DNA sequence
  source 1..48: mol_type = other DNA
aaggtaaatattgtttaccagtccatgaaatacgtcaaaaatgaaaat

SEQ ID NO: 669 - DNA, 39 bp, synthetic construct
  misc_feature 1..39: note = artificial DNA sequence
  source 1..39: mol_type = other DNA
gagataaagaaattgcacgtatataggaacctcggaacc

SEQ ID NO: 670 - DNA, 38 bp, synthetic construct
  misc_feature 1..38: note = artificial DNA sequence
  source 1..38: mol_type = other DNA
tttagcacaacgcctacagtaacagtagaattgtttaa

SEQ ID NO: 671 - DNA, 38 bp, synthetic construct
  misc_feature 1..38: note = artificial DNA sequence
  source 1..38: mol_type = other DNA
attcacaaaccaccagaaccatttttcaccagagccgc

SEQ ID NO: 672 - DNA, 43 bp, synthetic construct
  misc_feature 1..43: note = artificial DNA sequence
  source 1..43: mol_type = other DNA
tttgatttttagccttaaatcattatttatttttcccaatcca

SEQ ID NO: 673 - DNA, 38 bp, synthetic construct
  misc_feature 1..38: note = artificial DNA sequence
  source 1..38: mol_type = other DNA
ccgatttacttctgaatttctgctcatttgccgccagc

SEQ ID NO: 674 - DNA, 43 bp, synthetic construct
  misc_feature 1..43: note = artificial DNA sequence
  source 1..43: mol_type = other DNA
taacgagcgttagattttgcacctttttagctacagaacgcga

SEQ ID NO: 675 - DNA, 40 bp, synthetic construct
  misc_feature 1..40: note = artificial DNA sequence
  source 1..40: mol_type = other DNA
cgaagccctttttatttttgaaaagtaagcagatagccga

SEQ ID NO: 676 - DNA, 47 bp, synthetic construct
  misc_feature 1..47: note = artificial DNA sequence
  source 1..47: mol_type = other DNA
gtaacgatagcaaaattatttgcgcattagaagaataacgataaccc

SEQ ID NO: 677 - DNA, 56 bp, synthetic construct
  misc_feature 1..56: note = artificial DNA sequence
  source 1..56: mol_type = other DNA
agcggatcagggaagcacgtaaaacagaacccgtactatgtaatcctgtcagatga

SEQ ID NO: 678 - DNA, 48 bp, synthetic construct
  misc_feature 1..48: note = artificial DNA sequence
  source 1..48: mol_type = other DNA
atcaagaagaattaccttttttaatggaaacaacaagaaagcaaaaga

SEQ ID NO: 679 - DNA, 31 bp, synthetic construct
  misc_feature 1..31: note = artificial DNA sequence
  source 1..31: mol_type = other DNA
ccctcagaaccgtcagactttttttagcgcg

SEQ ID NO: 680 - DNA, 49 bp, synthetic construct
  misc_feature 1..49: note = artificial DNA sequence
  source 1..49: mol_type = other DNA
gatacaggagtgttttgacgctcacctgattaattgtttggatctggca

SEQ ID NO: 681 - DNA, 31 bp, synthetic construct
  misc_feature 1..31: note = artificial DNA sequence
  source 1..31: mol_type = other DNA
ataatggaagggttacatcaatagttgcttt

SEQ ID NO: 682 - DNA, 55 bp, synthetic construct
  misc_feature 1..55: note = artificial DNA sequence
  source 1..55: mol_type = other DNA
gggattttgttagtaaatgaattgaacctaccatatactaaagagacgcagaaac

SEQ ID NO: 683 - DNA, 31 bp, synthetic construct
  misc_feature 1..31: note = artificial DNA sequence
  source 1..31: mol_type = other DNA
tttggggtcgaggtgggaagcatacaattcc

SEQ ID NO: 684 - DNA, 35 bp, synthetic construct
  misc_feature 1..35: note = artificial DNA sequence
  source 1..35: mol_type = other DNA
cttctgtaacagaacgcgcctgtttttttatcaac

SEQ ID NO: 685 - DNA, 32 bp, synthetic construct
  misc_feature 1..32: note = artificial DNA sequence
  source 1..32: mol_type = other DNA
agggcgaaaaaccgtcagttgggcaaaggagc

SEQ ID NO: 686 - DNA, 34 bp, synthetic construct
  misc_feature 1..34: note = artificial DNA sequence
  source 1..34: mol_type = other DNA
gtcacctttttacttgagacgtacagcgccatga

SEQ ID NO: 687 - DNA, 39 bp, synthetic construct
  misc_feature 1..39: note = artificial DNA sequence
  source 1..39: mol_type = other DNA
atcccgtagaagatttttaagcgggttgtgtacatcgac

SEQ ID NO: 688 - DNA, 30 bp, synthetic construct
  misc_feature 1..30: note = artificial DNA sequence
  source 1..30: mol_type = other DNA
ttagaagtgccattggtgaggcggtgcctg

SEQ ID NO: 689 - DNA, 47 bp, synthetic construct
  misc_feature 1..47: note = artificial DNA sequence
  source 1..47: mol_type = other DNA
aggaataccgaacgaaccaccagcccacgctgcaccttgctgaacct

SEQ ID NO: 690 - DNA, 55 bp, synthetic construct
  misc_feature 1..55: note = artificial DNA sequence
  source 1..55: mol_type = other DNA
tcatattatcgtctgatttttatggattacaacaggaaatttttacgctcatgga

SEQ ID NO: 691 - DNA, 54 bp, synthetic construct
  misc_feature 1..54: note = artificial DNA sequence
  source 1..54: mol_type = other DNA
agaaccctttacattggcagataccagaagatcattttgcggaacaatgctgat

SEQ ID NO: 692 - DNA, 40 bp, synthetic construct
  misc_feature 1..40: note = artificial DNA sequence
  source 1..40: mol_type = other DNA
catcgccattaaacaaactgatagtggctattagtcttta

SEQ ID NO: 693 - DNA, 45 bp, synthetic construct
  misc_feature 1..45: note = artificial DNA sequence
  source 1..45: mol_type = other DNA
cagcaggctttttaaaatcctgtttgataaagccggcgaacgtgg

SEQ ID NO: 694 - DNA, 50 bp, synthetic construct
  misc_feature 1..50: note = artificial DNA sequence
  source 1..50: mol_type = other DNA
tggtcagcagcaaccgagcacatcaattttaaaagttaaccaccacaccc

SEQ ID NO: 695 - DNA, 48 bp, synthetic construct
  misc_feature 1..48: note = artificial DNA sequence
  source 1..48: mol_type = other DNA
acgttattctcataactgccgttcagggtaaagttaaacgagtttgag

SEQ ID NO: 696 - DNA, 32 bp, synthetic construct
  misc_feature 1..32: note = artificial DNA sequence
  source 1..32: mol_type = other DNA
aatcatactgaccattttctgcgagcttgccc

SEQ ID NO: 697 - DNA, 50 bp, synthetic construct
  misc_feature 1..50: note = artificial DNA sequence
  source 1..50: mol_type = other DNA
gttcagcaaatcgttaactttttgcatcagatgccgggttacctgcagcc

SEQ ID NO: 698 - DNA, 42 bp, synthetic construct
  misc_feature 1..42: note = artificial DNA sequence
  source 1..42: mol_type = other DNA
ggtaccgaccgagtaaaagagcagttgtttttaaggaattga

SEQ ID NO: 699 - DNA, 42 bp, synthetic construct
  misc_feature 1..42: note = artificial DNA sequence
  source 1..42: mol_type = other DNA
tcctcactgttctttttttgcgtccgtgagccgggtcactgt

SEQ ID NO: 700 - DNA, 40 bp, synthetic construct
  misc_feature 1..40: note = artificial DNA sequence
  source 1..40: mol_type = other DNA
ccaacggcagcaccccagcccgaggagtccactattaaag

SEQ ID NO: 701 - DNA, 49 bp, synthetic construct
  misc_feature 1..49: note = artificial DNA sequence
  source 1..49: mol_type = other DNA
gctcatgcaaatagatttaaagcatagagccagcagcaaatgggcgcga

SEQ ID NO: 702 - DNA, 42 bp, synthetic construct
  misc_feature 1..42: note = artificial DNA sequence
  source 1..42: mol_type = other DNA
cttataaatcgctgattgccctttttttaccgcctggccctg

SEQ ID NO: 703 - DNA, 37 bp, synthetic construct
  misc_feature 1..37: note = artificial DNA sequence
  source 1..37: mol_type = other DNA
ttttaatgacagtatcggcctcaggaagataatattc

SEQ ID NO: 704 - DNA, 44 bp, synthetic construct
  misc_feature 1..44: note = artificial DNA sequence
  source 1..44: mol_type = other DNA
ctaacggaacaacattattacatttcaactttaatccagcgatt

SEQ ID NO: 705 - DNA, 37 bp, synthetic construct
  misc_feature 1..37: note = artificial DNA sequence
  source 1..37: mol_type = other DNA
gccagctgcattaatgattttttcggccaacgcgcgg

SEQ ID NO: 706 - DNA, 48 bp, synthetic construct
  misc_feature 1..48: note = artificial DNA sequence
  source 1..48: mol_type = other DNA
atattatttttcgccaattagactggaaggttaatccgcctgccctgc

SEQ ID NO: 707 - DNA, 44 bp, synthetic construct
  misc_feature 1..44: note = artificial DNA sequence
  source 1..44: mol_type = other DNA
ccgattatttttagggatttctaaactttttggaggttacaaac

SEQ ID NO: 708 - DNA, 41 bp, synthetic construct
  misc_feature 1..41: note = artificial DNA sequence
  source 1..41: mol_type = other DNA
gaactgaccaactttgccgaataacctgtttaggtggcatc

SEQ ID NO: 709 - DNA, 38 bp, synthetic construct
  misc_feature 1..38: note = artificial DNA sequence
  source 1..38: mol_type = other DNA
agacaatatctggccataagaatacaatagaaacaact

SEQ ID NO: 710 - DNA, 38 bp, synthetic construct
  misc_feature 1..38: note = artificial DNA sequence
  source 1..38: mol_type = other DNA
gctatattttcatttgcaatcataaacgtaacaaagct

SEQ ID NO: 711 - DNA, 40 bp, synthetic construct
  misc_feature 1..40: note = artificial DNA sequence
  source 1..40: mol_type = other DNA
aggtctttcaaaaggatgttttaaaacagttgattcccaa

SEQ ID NO: 712 - DNA, 40 bp, synthetic construct
  misc_feature 1..40: note = artificial DNA sequence
  source 1..40: mol_type = other DNA
aaaaaagccgcacaggcggcctttagtgatgacggcaaac

SEQ ID NO: 713 - DNA, 48 bp, synthetic construct
  misc_feature 1..48: note = artificial DNA sequence
  source 1..48: mol_type = other DNA
tgttacttgtcattgcaggcgcttcaaccagcttgaggataactcgta

SEQ ID NO: 714 - DNA, 48 bp, synthetic construct
  misc_feature 1..48: note = artificial DNA sequence
  source 1..48: mol_type = other DNA
cttttgatgctcaacacagttcagtgacgagaaacaccagattcatta

SEQ ID NO: 715 - DNA, 38 bp, synthetic construct
  misc_feature 1..38: note = artificial DNA sequence
  source 1..38: mol_type = other DNA
aatcaatatctggtcagttgtttttcaaatacgcgtgc

SEQ ID NO: 716 - DNA, 39 bp, synthetic construct
  misc_feature 1..39: note = artificial DNA sequence
  source 1..39: mol_type = other DNA
aaaacgagaatacgtcagcgtggttaattgcagagccgt

SEQ ID NO: 717 - DNA, 48 bp, synthetic construct
  misc_feature 1..48: note = artificial DNA sequence
  source 1..48: mol_type = other DNA
agatacatcccaaatcagggaacctttgtatcatcgcctgataaattg

SEQ ID NO: 718 - DNA, 40 bp, synthetic construct
  misc_feature 1..40: note = artificial DNA sequence
  source 1..40: mol_type = other DNA
tcagcgggagccggaatccgcgacctgctccaaggtttct

SEQ ID NO: 719 - DNA, 42 bp, synthetic construct
  misc_feature 1..42: note = artificial DNA sequence
  source 1..42: mol_type = other DNA
gaggaaagccagctttccgcaatacactatcataaccctcgt

SEQ ID NO: 720 - DNA, 48 bp, synthetic construct
  misc_feature 1..48: note = artificial DNA sequence
  source 1..48: mol_type = other DNA
ggaacgtgccggacttgtagagacatttttgcgcgcatcggataggtc

SEQ ID NO: 721 - DNA, 47 bp, synthetic construct
  misc_feature 1..47: note = artificial DNA sequence
  source 1..47: mol_type = other DNA
atgcgcgaggcaaagagtaccaaaatgctgtaaagaggtccataaat

SEQ ID NO: 722 - DNA, 40 bp, synthetic construct
  misc_feature 1..40: note = artificial DNA sequence
  source 1..40: mol_type = other DNA
ttgctcgtggctggtaatgggtaacaaatatctatcttta

SEQ ID NO: 723 - DNA, 39 bp, synthetic construct
  misc_feature 1..39: note = artificial DNA sequence
  source 1..39: mol_type = other DNA
tgtcgaaacgaggcgcagacggtgaaaaatcatttagtt

SEQ ID NO: 724 - DNA, 39 bp, synthetic construct
  misc_feature 1..39: note = artificial DNA sequence
  source 1..39: mol_type = other DNA
agtgtagcgttttttcacgctgcttttttcgtctcgagg

SEQ ID NO: 725 - DNA, 48 bp, synthetic construct
  misc_feature 1..48: note = artificial DNA sequence
  source 1..48: mol_type = other DNA
gggacgactaaccgtgcatctgccgtagatggggatggctcacacgac

SEQ ID NO: 726 - DNA, 39 bp, synthetic construct
  misc_feature 1..39: note = artificial DNA sequence
  source 1..39: mol_type = other DNA
cagatgaaataccaagcgcgaaacaaagtacaacggaga

SEQ ID NO: 727 - DNA, 48 bp, synthetic construct
  misc_feature 1..48: note = artificial DNA sequence
  source 1..48: mol_type = other DNA
accgcctgcaacagtgagaagataggagcacttaatacatttacggct

SEQ ID NO: 728 - DNA, 43 bp, synthetic construct
  misc_feature 1..43: note = artificial DNA sequence
  source 1..43: mol_type = other DNA
taaaaaaaacgtggactttttccaacgtcaaatcggcaaaatc

SEQ ID NO: 729 - DNA, 40 bp, synthetic construct
  misc_feature 1..40: note = artificial DNA sequence
  source 1..40: mol_type = other DNA
caatctgtccatcacgtagtaataacttttttcacttcag

SEQ ID NO: 730 - DNA, 47 bp, synthetic construct
  misc_feature 1..47: note = artificial DNA sequence
  source 1..47: mol_type = other DNA
aaacagagttctgacctgaaagcgacagagatttaaatcctttgagc

SEQ ID NO: 731 - DNA, 40 bp, synthetic construct
  misc_feature 1..40: note = artificial DNA sequence
  source 1..40: mol_type = other DNA
aagagcaactgcggaatcgtcatacgcactccgcccgaaa

SEQ ID NO: 732 - DNA, 40 bp, synthetic construct
  misc_feature 1..40: note = artificial DNA sequence
  source 1..40: mol_type = other DNA
gggcgcggggtttgcgagtgagacgggcaacaaaaagaat

SEQ ID NO: 733 - DNA, 47 bp, synthetic construct
  misc_feature 1..47: note = artificial DNA sequence
  source 1..47: mol_type = other DNA
tgctggtcggaggtgtccatcagtgaataagacgagtagtgaatata

SEQ ID NO: 734 - DNA, 46 bp, synthetic construct
  misc_feature 1..46: note = artificial DNA sequence
  source 1..46: mol_type = other DNA
cataaacatcccttacactggtgtggagaggcttgcggtatgagcc

SEQ ID NO: 735 - DNA, 40 bp, synthetic construct
  misc_feature 1..40: note = artificial DNA sequence
  source 1..40: mol_type = other DNA
aacataaaagggacattttttgaaccctaaaacgtggcac

SEQ ID NO: 736 - DNA, 46 bp, synthetic construct
  misc_feature 1..46: note = artificial DNA sequence
  source 1..46: mol_type = other DNA
accctgactattatagttttttagaagcccacattcatttttctaa

SEQ ID NO: 737 - DNA, 46 bp, synthetic construct
  misc_feature 1..46: note = artificial DNA sequence
  source 1..46: mol_type = other DNA
tcaaaaggattcgcagtaaacgctcagcagaatcatagaagagtca

SEQ ID NO: 738 - DNA, 46 bp, synthetic construct
  misc_feature 1..46: note = artificial DNA sequence
  source 1..46: mol_type = other DNA
atatgctttttactaaagtacggagagtacttttttttaattgctc

SEQ ID NO: 739 - DNA, 47 bp, synthetic construct
  misc_feature 1..47: note = artificial DNA sequence
  source 1..47: mol_type = other DNA
ctccggctaacatagcgatagcttagattaagttaattgattgaaat

SEQ ID NO: 740 - DNA, 46 bp, synthetic construct
  misc_feature 1..46: note = artificial DNA sequence
  source 1..46: mol_type = other DNA
attcgcgtctggcaaacagcttggcgggatcgtcccgtgtgataaa

SEQ ID NO: 741 - DNA, 46 bp, synthetic construct
  misc_feature 1..46: note = artificial DNA sequence
  source 1..46: mol_type = other DNA
gggcgatcggtgcggcgacaatgaacgccattcagctcaaagcctc

SEQ ID NO: 742 - DNA, 47 bp, synthetic construct
  misc_feature 1..47: note = artificial DNA sequence
  source 1..47: mol_type = other DNA
tctttgaccccattgtgaattttttaccttatgcgataataaaacga

SEQ ID NO: 743 - DNA, 48 bp, synthetic construct
  misc_feature 1..48: note = artificial DNA sequence
  source 1..48: mol_type = other DNA
accgaaccttaatattttgcctgaagatctacaaaggctacgccaccc

SEQ ID NO: 744 - DNA, 46 bp, synthetic construct
  misc_feature 1..46: note = artificial DNA sequence
  source 1..46: mol_type = other DNA
tcctcattaaagcccagacgatcggtcataatcaaaatacctaaat

SEQ ID NO: 745 - DNA, 45 bp, synthetic construct
  misc_feature 1..45: note = artificial DNA sequence
  source 1..45: mol_type = other DNA
ttctagctgaagtagtagtttttattaacatccaatagctgaaaa

SEQ ID NO: 746 - DNA, 48 bp, synthetic construct
  misc_feature 1..48: note = artificial DNA sequence
  source 1..48: mol_type = other DNA
gtgagaaaggccgttgaggcaggtagaatggaagcaccgttaccatta

SEQ ID NO: 747 - DNA, 47 bp, synthetic construct
  misc_feature 1..47: note = artificial DNA sequence
  source 1..47: mol_type = other DNA
ataattacctttccagagccttttgacattcaaccgattgagggagg

SEQ ID NO: 748 - DNA, 48 bp, synthetic construct
  misc_feature 1..48: note = artificial DNA sequence
  source 1..48: mol_type = other DNA
caaaataaacagccataagattagttgctaaaacatgttcagctaatg

SEQ ID NO: 749 - DNA, 44 bp, synthetic construct
  misc_feature 1..44: note = artificial DNA sequence
  source 1..44: mol_type = other DNA
acgacgacttaatttcccggaatcttttcatcatcaagtttgcc

SEQ ID NO: 750 - DNA, 48 bp, synthetic construct
  misc_feature 1..48: note = artificial DNA sequence
  source 1..48: mol_type = other DNA
cgccagcatcagaaccccgcctccctcagagctttttaacttaatggt

SEQ ID NO: 751 - DNA, 48 bp, synthetic construct
  misc_feature 1..48: note = artificial DNA sequence
  source 1..48: mol_type = other DNA
aatcggttattagcaaaattttttaagcaatattttttaaacaggaag

SEQ ID NO: 752 - DNA, 48 bp, synthetic construct
  misc_feature 1..48: note = artificial DNA sequence
  source 1..48: mol_type = other DNA
aagagaatagcaaatattcaaccgatgtgtaggtaaagattgcaatgc

SEQ ID NO: 753 - DNA, 49 bp, synthetic construct
  misc_feature 1..49: note = artificial DNA sequence
  source 1..49: mol_type = other DNA
cagtaattatgaccctgtaattttttcttttgcgggagagcataaagct

SEQ ID NO: 754 - DNA, 49 bp, synthetic construct
  misc_feature 1..49: note = artificial DNA sequence
  source 1..49: mol_type = other DNA
gaaaccgaaaaagggctgtcacaagcgacagaggcatttttggccttga

SEQ ID NO: 755 - DNA, 48 bp, synthetic construct
  misc_feature 1..48: note = artificial DNA sequence
  source 1..48: mol_type = other DNA
aaaactttttcaaatataaatgcttattaattaattttcccttagaat

SEQ ID NO: 756 - DNA, 44 bp, synthetic construct
  misc_feature 1..44: note = artificial DNA sequence
  source 1..44: mol_type = other DNA
gctacagaggctttgaccgatataaagttttttttattccatat

SEQ ID NO: 757 - DNA, 49 bp, synthetic construct
  misc_feature 1..49: note = artificial DNA sequence
  source 1..49: mol_type = other DNA
aactgtcatgccattcgccattcaggggggatgtgctgcaaacgccagc

SEQ ID NO: 758 - DNA, 49 bp, synthetic construct
  misc_feature 1..49: note = artificial DNA sequence
  source 1..49: mol_type = other DNA
tcagttgtttttagatttctacgtttttaagaactggctcacgaaagag

SEQ ID NO: 759 - DNA, 44 bp, synthetic construct
  misc_feature 1..44: note = artificial DNA sequence
  source 1..44: mol_type = other DNA
cggtgtttttacagaccagggcaaaagaatacactaaaacactc

SEQ ID NO: 760 - DNA, 54 bp, synthetic construct
  misc_feature 1..54: note = artificial DNA sequence
  source 1..54: mol_type = other DNA
aaaaccaaaagaaaaataggaatactggctgaccttcattttttaagagtaatc

SEQ ID NO: 761 - DNA, 41 bp, synthetic construct
  misc_feature 1..41: note = artificial DNA sequence
  source 1..41: mol_type = other DNA
tctggtgccggaaaccataatagtaaaatgtttcgacgata

SEQ ID NO: 762 - DNA, 40 bp, synthetic construct
  misc_feature 1..40: note = artificial DNA sequence
  source 1..40: mol_type = other DNA
gccagttaacaaagttaccagaagggccagtgggtgaatt

SEQ ID NO: 763 - DNA, 37 bp, synthetic construct
  misc_feature 1..37: note = artificial DNA sequence
  source 1..37: mol_type = other DNA
acaaacggcggatttttttaccgtaatggtcgagctt

SEQ ID NO: 764 - DNA, 40 bp, synthetic construct
  misc_feature 1..40: note = artificial DNA sequence
  source 1..40: mol_type = other DNA
cgcataggggactaaagcatgtcaatcatttttatgtacc

SEQ ID NO: 765 - DNA, 40 bp, synthetic construct
  misc_feature 1..40: note = artificial DNA sequence
  source 1..40: mol_type = other DNA
ctgaggcttgcagggaaacgagggattgtatacgatgaac

SEQ ID NO: 766 - DNA, 38 bp, synthetic construct
  misc_feature 1..38: note = artificial DNA sequence
  source 1..38: mol_type = other DNA
attctactaattaaggtaatcgtaaaactagacttttt

SEQ ID NO: 767 - DNA, 38 bp, synthetic construct
  misc_feature 1..38: note = artificial DNA sequence
  source 1..38: mol_type = other DNA
gttaaaggttgttaaacaaaaatactgagtaagaagcc

SEQ ID NO: 768 - DNA, 39 bp, synthetic construct
  misc_feature 1..39: note = artificial DNA sequence
  source 1..39: mol_type = other DNA
ttgctttcgagggttgcaaggccctaaaggacggagtga

SEQ ID NO: 769 - DNA, 31 bp, synthetic construct
  misc_feature 1..31: note = artificial DNA sequence
  source 1..31: mol_type = other DNA
cacccttcctgtagcgcttcggtttatcagc

SEQ ID NO: 770 - DNA, 42 bp, synthetic construct
  misc_feature 1..42: note = artificial DNA sequence
  source 1..42: mol_type = other DNA
ttcgcaaatggtcgttgatattttttcagaaaagccccaaaa

SEQ ID NO: 771 - DNA, 39 bp, synthetic construct
  misc_feature 1..39: note = artificial DNA sequence
  source 1..39: mol_type = other DNA
gagtctggagcaaactttatcaacgaaagacagcatcgg

SEQ ID NO: 772 - DNA, 32 bp, synthetic construct
  misc_feature 1..32: note = artificial DNA sequence
  source 1..32: mol_type = other DNA
aataaacaaagcctgtttagtatcttaaattt

SEQ ID NO: 773 - DNA, 39 bp, synthetic construct
  misc_feature 1..39: note = artificial DNA sequence
  source 1..39: mol_type = other DNA
taccagcgccaaaaaacagtcacgacgttgtaaaacgac

SEQ ID NO: 774 - DNA, 39 bp, synthetic construct
  misc_feature 1..39: note = artificial DNA sequence
  source 1..39: mol_type = other DNA
gttatatacacgccaccaccggaagccaccctcagagcc

SEQ ID NO: 775 - DNA, 39 bp, synthetic construct
  misc_feature 1..39: note = artificial DNA sequence
  source 1..39: mol_type = other DNA
attaatgccggagagggtagctaatatgatatttaaatt

SEQ ID NO: 776 - DNA, 39 bp, synthetic construct
  misc_feature 1..39: note = artificial DNA sequence
  source 1..39: mol_type = other DNA
agcaccataatcagtatcaatagataaataagtatacaa

SEQ ID NO: 777 - DNA, 40 bp, synthetic construct
  misc_feature 1..40: note = artificial DNA sequence
  source 1..40: mol_type = other DNA
cagctttcatcaaggtcaggattaccaataggacaacaac

SEQ ID NO: 778 - DNA, 40 bp, synthetic construct
  misc_feature 1..40: note = artificial DNA sequence
  source 1..40: mol_type = other DNA
ttgccatcagggagacagtcaaatcaccatcatttttgag

SEQ ID NO: 779 - DNA, 40 bp, synthetic construct
  misc_feature 1..40: note = artificial DNA sequence
  source 1..40: mol_type = other DNA
ttaaatttccgcttttataccgatagttgcgcgcctcttc

SEQ ID NO: 780 - DNA, 40 bp, synthetic construct
  misc_feature 1..40: note = artificial DNA sequence
  source 1..40: mol_type = other DNA
tctaaagttttgttttgggaattagatttttccagcaaaa

SEQ ID NO: 781 - DNA, 34 bp, synthetic construct
  misc_feature 1..34: note = artificial DNA sequence
  source 1..34: mol_type = other DNA
taccagaagacttttttggatagcgtcgcaccgc

SEQ ID NO: 782 - DNA, 40 bp, synthetic construct
  misc_feature 1..40: note = artificial DNA sequence
  source 1..40: mol_type = other DNA
attagcgttcgatagcaagagaaccctcatatattttaaa

SEQ ID NO: 783 - DNA, 40 bp, synthetic construct
  misc_feature 1..40: note = artificial DNA sequence
  source 1..40: mol_type = other DNA
atagtgaagtaaaatacgtaatgcagtttccattaaacgg

SEQ ID NO: 784 - DNA, 40 bp, synthetic construct
  misc_feature 1..40: note = artificial DNA sequence
  source 1..40: mol_type = other DNA
ttgacaggttttcatagccccctttaaggcgtaaattcat

SEQ ID NO: 785 - DNA, 34 bp, synthetic construct
  misc_feature 1..34: note = artificial DNA sequence
  source 1..34: mol_type = other DNA
atcttctgcaccggaaccagacctcagaaccgcc

SEQ ID NO: 786 - DNA, 40 bp, synthetic construct
  misc_feature 1..40: note = artificial DNA sequence
  source 1..40: mol_type = other DNA
aggaacaaggaaacgtgataaaaatttttcgcagtctctg

SEQ ID NO: 787 - DNA, 40 bp, synthetic construct
  misc_feature 1..40: note = artificial DNA sequence
  source 1..40: mol_type = other DNA
agtttcagattgcgaataataattttttcacctcaccagt

SEQ ID NO: 788 - DNA, 38 bp, synthetic construct
  misc_feature 1..38: note = artificial DNA sequence
  source 1..38: mol_type = other DNA
tttatttcccgtgggagcgagtaacaacccgtgccttt

SEQ ID NO: 789 - DNA, 44 bp, synthetic construct
  misc_feature 1..44: note = artificial DNA sequence
  source 1..44: mol_type = other DNA
tggtgtttttattttcatcgcgagaacagggtgcctcacccaaa

SEQ ID NO: 790 - DNA, 44 bp, synthetic construct
  misc_feature 1..44: note = artificial DNA sequence
  source 1..44: mol_type = other DNA
ttttcacgtcgtaatctgcgctcaaaagcctgagcaagccggtt

SEQ ID NO: 791 - DNA, 47 bp, synthetic construct
  misc_feature 1..47: note = artificial DNA sequence
  source 1..47: mol_type = other DNA
attgctttagcatatagaaggctttattaaacacaagaattgacaat

SEQ ID NO: 792 - DNA, 52 bp, synthetic construct
  misc_feature 1..52: note = artificial DNA sequence
  source 1..52: mol_type = other DNA
aattttatcctccttttacatcggacgcgaggcccatcctcggctgtcggct

SEQ ID NO: 793 - DNA, 44 bp, synthetic construct
  misc_feature 1..44: note = artificial DNA sequence
  source 1..44: mol_type = other DNA
tttgtttccttatcattccatcaataataatttacgtttcattt

SEQ ID NO: 794 - DNA, 47 bp, synthetic construct
  misc_feature 1..47: note = artificial DNA sequence
  source 1..47: mol_type = other DNA
tcctgttaagccgagaattaactgaacacccatcagagaataaaaac

SEQ ID NO: 795 - DNA, 44 bp, synthetic construct
  misc_feature 1..44: note = artificial DNA sequence
  source 1..44: mol_type = other DNA
tttggtaattgagcgctaattgaacaaatgaaccataaacttaa

SEQ ID NO: 796 - DNA, 51 bp, synthetic construct
  misc_feature 1..51: note = artificial DNA sequence
  source 1..51: mol_type = other DNA
gccagaataaattgttcctaaaggtcaagtttcactacggtcagaggttct

SEQ ID NO: 797 - DNA, 37 bp, synthetic construct
  misc_feature 1..37: note = artificial DNA sequence
  source 1..37: mol_type = other DNA
aaagaggattgacaagatggtttaaggtagagtaaat

SEQ ID NO: 798 - DNA, 44 bp, synthetic construct
  misc_feature 1..44: note = artificial DNA sequence
  source 1..44: mol_type = other DNA
gagaaaggatcgctggcagccttggaacaaatagggttgagtgt

SEQ ID NO: 799 - DNA, 38 bp, synthetic construct
  misc_feature 1..38: note = artificial DNA sequence
  source 1..38: mol_type = other DNA
tttgagaaccggataacgagtaaagattcatgcagata

SEQ ID NO: 800 - DNA, 48 bp, synthetic construct
  misc_feature 1..48: note = artificial DNA sequence
  source 1..48: mol_type = other DNA
ccacgctggtttgcgtcggtggtgccttttcacctattgggcgccagt

SEQ ID NO: 801 - DNA, 35 bp, synthetic construct
  misc_feature 1..35: note = artificial DNA sequence
  source 1..35: mol_type = other DNA
caaagcgaatatcgcgcaaaaatcattgaatccct

SEQ ID NO: 802 - DNA, 30 bp, synthetic construct
  misc_feature 1..30: note = artificial DNA sequence
  source 1..30: mol_type = other DNA
tcagttccggccagcaagaatgaattcgac

SEQ ID NO: 803 - DNA, 45 bp, synthetic construct
  misc_feature 1..45: note = artificial DNA sequence
  source 1..45: mol_type = other DNA
tttttcatcccacgtcgcactcatctaaaaaaaccctctattaac

SEQ ID NO: 804 - DNA, 34 bp, synthetic construct
  misc_feature 1..34: note = artificial DNA sequence
  source 1..34: mol_type = other DNA
tatgctttaaaattacgaggcatagtcataacgc

SEQ ID NO: 805 - DNA, 49 bp, synthetic construct
  misc_feature 1..49: note = artificial DNA sequence
  source 1..49: mol_type = other DNA
tagcaacgcatgaggacactacgaaggcaccaacctaaaattataccat

SEQ ID NO: 806 - DNA, 42 bp, synthetic construct
  misc_feature 1..42: note = artificial DNA sequence
  source 1..42: mol_type = other DNA
tacgttgggaatagcgaacgcataaaaagcggattgtgggaa

SEQ ID NO: 807 - DNA, 35 bp, synthetic construct
  misc_feature 1..35: note = artificial DNA sequence
  source 1..35: mol_type = other DNA
gtgtctggttcggtcgcatcgcccgaggcttttgt

SEQ ID NO: 808 - DNA, 38 bp, synthetic construct
  misc_feature 1..38: note = artificial DNA sequence
  source 1..38: mol_type = other DNA
taagttttgccagagggggggcaaagccaaaaagatta

SEQ ID NO: 809 - DNA, 40 bp, synthetic construct
  misc_feature 1..40: note = artificial DNA sequence
  source 1..40: mol_type = other DNA
tagtagggcacgctgaggtctgagagactacctcaggtca

SEQ ID NO: 810 - DNA, 34 bp, synthetic construct
  misc_feature 1..34: note = artificial DNA sequence
  source 1..34: mol_type = other DNA
tacataacaacgccaaccagtataaagccaacgt

SEQ ID NO: 811 - DNA, 48 bp, synthetic construct
  misc_feature 1..48: note = artificial DNA sequence
  source 1..48: mol_type = other DNA
tcaacatataaaagaaaatgtgaatttcttaatgaaaccattgttaaa

SEQ ID NO: 812 - DNA, 43 bp, synthetic construct
  misc_feature 1..43: note = artificial DNA sequence
  source 1..43: mol_type = other DNA
aattgtaattggcgattaagttgggtaacgccagatacataat

SEQ ID NO: 813 - DNA, 40 bp, synthetic construct
  misc_feature 1..40: note = artificial DNA sequence
  source 1..40: mol_type = other DNA
agtaattatataaagtaccgacagaatcgccatattaatt

SEQ ID NO: 814 - DNA, 39 bp, synthetic construct
  misc_feature 1..39: note = artificial DNA sequence
  source 1..39: mol_type = other DNA
aaaggtaaattcttacatgtaatttggcatgattaaagt

SEQ ID NO: 815 - DNA, 38 bp, synthetic construct
  misc_feature 1..38: note = artificial DNA sequence
  source 1..38: mol_type = other DNA
tagcagagaaaatacggttttccaaggctccaaaagga

SEQ ID NO: 816 - DNA, 40 bp, synthetic construct
  misc_feature 1..40: note = artificial DNA sequence
  source 1..40: mol_type = other DNA
tcatcagtaataagagactgtccagccttgaataggttgg

SEQ ID NO: 817 - DNA, 42 bp, synthetic construct
  misc_feature 1..42: note = artificial DNA sequence
  source 1..42: mol_type = other DNA
atgttagccaccacgaaaagaactaggcagaggcattttcgt

SEQ ID NO: 818 - DNA, 35 bp, synthetic construct
  misc_feature 1..35: note = artificial DNA sequence
  source 1..35: mol_type = other DNA
tcggaatacccgaataagtatatgcgtaataaaca

SEQ ID NO: 819 - DNA, 48 bp, synthetic construct
  misc_feature 1..48: note = artificial DNA sequence
  source 1..48: mol_type = other DNA
cgcaaagaaaacgtactccttattacgcagtggaaacgcaataaagtt

SEQ ID NO: 820 - DNA, 40 bp, synthetic construct
  misc_feature 1..40: note = artificial DNA sequence
  source 1..40: mol_type = other DNA
ctcaggtttttggtttagtaccgcactatatgtattttag

SEQ ID NO: 821 - DNA, 58 bp, synthetic construct
  misc_feature 1..58: note = artificial DNA sequence
  source 1..58: mol_type = other DNA
gcagtagagtaggtagagattaggcatggcaattttctgtatcttttgatgacttagc

SEQ ID NO: 822 - DNA, 58 bp, synthetic construct
  misc_feature 1..58: note = artificial DNA sequence
  source 1..58: mol_type = other DNA
gcagtagagtaggtagagattaggcaggtgaaggccacgtctttccagacgctaaaca

SEQ ID NO: 823 - DNA, 58 bp, synthetic construct
  misc_feature 1..58: note = artificial DNA sequence
  source 1..58: mol_type = other DNA
gcagtagagtaggtagagattaggcagggcgctagggcgtatagagcttgcgatggcc

SEQ ID NO: 824 - DNA, 58 bp, synthetic construct
  misc_feature 1..58: note = artificial DNA sequence
  source 1..58: mol_type = other DNA
gcagtagagtaggtagagattaggcaacgttggtaagaaacctcaccagttagcccga

SEQ ID NO: 825 - DNA, 62 bp, synthetic construct
  misc_feature 1..62: note = artificial DNA sequence
  source 1..62: mol_type = other DNA
gcagtagagtaggtagagattaggcagcggtccggcgttgagtaacattgagcggaattatc

SEQ ID NO: 826 - DNA, 67 bp, synthetic construct
  misc_feature 1..67: note = artificial DNA sequence
  source 1..67: mol_type = other DNA
gcagtagagtaggtagagattaggcagacttcaaaccagacctttttgaagcaaactccagctgcgc

SEQ ID NO: 827 - DNA, 50 bp, synthetic construct
  misc_feature 1..50: note = artificial DNA sequence
  source 1..50: mol_type = other DNA
gcagtagagtaggtagagattaggcagaatagaacggattctaacgcaag

SEQ ID NO: 828 - DNA, 49 bp, synthetic construct
  misc_feature 1..49: note = artificial DNA sequence
  source 1..49: mol_type = other DNA
gcagtagagtaggtagagattaggcatggcgaaaacacattaaatgtga

SEQ ID NO: 829 - DNA, 50 bp, synthetic construct
  misc_feature 1..50: note = artificial DNA sequence
  source 1..50: mol_type = other DNA
gcagtagagtaggtagagattaggcaatcacgttgaaaatctccaaagac

SEQ ID NO: 830 - DNA, 48 bp, synthetic construct
  misc_feature 1..48: note = artificial DNA sequence
  source 1..48: mol_type = other DNA
gtgccccctgcccgctagagagttccgggggtccgtggtggttccgaa

SEQ ID NO: 831 - DNA, 54 bp, synthetic construct
  misc_feature 1..54: note = artificial DNA sequence
  source 1..54: mol_type = other DNA
agaaaacaaagaagatgatgaaacccctgcctgtaccagggatacagagccaga

SEQ ID NO: 832 - DNA, 39 bp, synthetic construct
  misc_feature 1..39: note = artificial DNA sequence
  source 1..39: mol_type = other DNA
gagcaaaattatttgacgtataatgatataactgaattt

SEQ ID NO: 833 - DNA, 54 bp, synthetic construct
  misc_feature 1..54: note = artificial DNA sequence
  source 1..54: mol_type = other DNA
acggatttctttgctgcggctggtaatgggaaacatcagaaaaatatgctttga

SEQ ID NO: 834 - DNA, 38 bp, synthetic construct
  misc_feature 1..38: note = artificial DNA sequence
  source 1..38: mol_type = other DNA
gaattattagtaccttttcaggtttaacattgaagcct

SEQ ID NO: 835 - DNA, 43 bp, synthetic construct
  misc_feature 1..43: note = artificial DNA sequence
  source 1..43: mol_type = other DNA
tagcaagcaataaaagccgtttttttttattttctgctgatgc

SEQ ID NO: 836 - DNA, 39 bp, synthetic construct
  misc_feature 1..39: note = artificial DNA sequence
  source 1..39: mol_type = other DNA
atttgaattaccttttttaatggaaatttttagtacata

SEQ ID NO: 837 - DNA, 47 bp, synthetic construct
  misc_feature 1..47: note = artificial DNA sequence
  source 1..47: mol_type = other DNA
accctcataaatggaagggttagaaatgaaaaaacgattattattta

SEQ ID NO: 838 - DNA, 45 bp, synthetic construct
  misc_feature 1..45: note = artificial DNA sequence
  source 1..45: mol_type = other DNA
gcacgcgagcattaattgcgttccgggcgagcaaatcgttaacgg

SEQ ID NO: 839 - DNA, 44 bp, synthetic construct
  misc_feature 1..44: note = artificial DNA sequence
  source 1..44: mol_type = other DNA
cgcgcttaatgcgccgctacgaatcagaatcggaaccggcgggc

SEQ ID NO: 840 - DNA, 48 bp, synthetic construct
  misc_feature 1..48: note = artificial DNA sequence
  source 1..48: mol_type = other DNA
tgcgtagagccaccctaccgtactcaggaggtagcggggtttacaaaa

SEQ ID NO: 841 - DNA, 32 bp, synthetic construct
  misc_feature 1..32: note = artificial DNA sequence
  source 1..32: mol_type = other DNA
acatgtggtgctgcggctgagaagcgtgcttt

SEQ ID NO: 842 - DNA, 40 bp, synthetic construct
  misc_feature 1..40: note = artificial DNA sequence
  source 1..40: mol_type = other DNA
tttacatcacagaaatcaaataagatagcagctcttacca

SEQ ID NO: 843 - DNA, 48 bp, synthetic construct
  misc_feature 1..48: note = artificial DNA sequence
  source 1..48: mol_type = other DNA
taaaagaaacggggatgtgctgcaacataaaataaatcaagattagtt

SEQ ID NO: 844 - DNA, 38 bp, synthetic construct
  misc_feature 1..38: note = artificial DNA sequence
  source 1..38: mol_type = other DNA
cagtacctggtgtatccagaaccgtcattaacgccacc

SEQ ID NO: 845 - DNA, 55 bp, synthetic construct
  misc_feature 1..55: note = artificial DNA sequence
  source 1..55: mol_type = other DNA
taccgtaaagcaagcccaataggatacttctgaatacgcacggccagtgccaagc

SEQ ID NO: 846 - DNA, 48 bp, synthetic construct
  misc_feature 1..48: note = artificial DNA sequence
  source 1..48: mol_type = other DNA
atcgtaggaatcgtcagatgaataatcggctggataagtcctgaacaa

SEQ ID NO: 847 - DNA, 42 bp, synthetic construct
  misc_feature 1..42: note = artificial DNA sequence
  source 1..42: mol_type = other DNA
gccattcaggctgcgcaactgttgggtttttagggcgatcgg

SEQ ID NO: 848 - DNA, 55 bp, synthetic construct
  misc_feature 1..55: note = artificial DNA sequence
  source 1..55: mol_type = other DNA
tttcagagaacgtcaaaacctaccatatccctactatggatcagatgggaattat

SEQ ID NO: 849 - DNA, 48 bp, synthetic construct
  misc_feature 1..48: note = artificial DNA sequence
  source 1..48: mol_type = other DNA
tgcccgtacggggtcagtgccttgcaatactttatcggcctaatcagt

SEQ ID NO: 850 - DNA, 40 bp, synthetic construct
  misc_feature 1..40: note = artificial DNA sequence
  source 1..40: mol_type = other DNA
catgaatttttgtattaagaggcttaacctccaaagaacg

SEQ ID NO: 851 - DNA, 40 bp, synthetic construct
  misc_feature 1..40: note = artificial DNA sequence
  source 1..40: mol_type = other DNA
tcttcgctattacgccacgacgttagagaataaggcgatt

SEQ ID NO: 852 - DNA, 39 bp, synthetic construct
  misc_feature 1..39: note = artificial DNA sequence
  source 1..39: mol_type = other DNA
ccgatttaatataatcgccacgggaacggataacctcac

SEQ ID NO: 853 - DNA, 32 bp, synthetic construct
  misc_feature 1..32: note = artificial DNA sequence
  source 1..32: mol_type = other DNA
agggcgaaaaaccgtccggaaacaaaggagcg

SEQ ID NO: 854 - DNA, 46 bp, synthetic construct
  misc_feature 1..46: note = artificial DNA sequence
  source 1..46: mol_type = other DNA
attggccttgatattcacaaacaacgcagtctgtatagctgccgtc

SEQ ID NO: 855 - DNA, 40 bp, synthetic construct
  misc_feature 1..40: note = artificial DNA sequence
  source 1..40: mol_type = other DNA
tatcagggcggggaaaagcactaagcgggagcagacagga

SEQ ID NO: 856 - DNA, 39 bp, synthetic construct
  misc_feature 1..39: note = artificial DNA sequence
  source 1..39: mol_type = other DNA
cgatggcctttggggtcgaggtgttctgccacgttttca

SEQ ID NO: 857 - DNA, 47 bp, synthetic construct
  misc_feature 1..47: note = artificial DNA sequence
  source 1..47: mol_type = other DNA
acagggaagcgcattatgcgggccagacactttttcacggaataagt

SEQ ID NO: 858 - DNA, 40 bp, synthetic construct
  misc_feature 1..40: note = artificial DNA sequence
  source 1..40: mol_type = other DNA
ccctcagaaccgtttgccatcttttttttcataatcaaaa

SEQ ID NO: 859 - DNA, 39 bp, synthetic construct
  misc_feature 1..39: note = artificial DNA sequence
  source 1..39: mol_type = other DNA
atggaaagataaatccccaccctcagaaagccacgtaaa

SEQ ID NO: 860 - DNA, 40 bp, synthetic construct
  misc_feature 1..40: note = artificial DNA sequence
  source 1..40: mol_type = other DNA
accgtctggtaatatcatacctaccctcgttaagggcgcg

SEQ ID NO: 861 - DNA, 48 bp, synthetic construct
  misc_feature 1..48: note = artificial DNA sequence
  source 1..48: mol_type = other DNA
cagaacaaacggtacggaggccacgcgcagtggtgtgttccggttgcg

SEQ ID NO: 862 - DNA, 40 bp, synthetic construct
  misc_feature 1..40: note = artificial DNA sequence
  source 1..40: mol_type = other DNA
gacgggagaattaattttttgaacaccctgaacaaagtca

SEQ ID NO: 863 - DNA, 34 bp, synthetic construct
  misc_feature 1..34: note = artificial DNA sequence
  source 1..34: mol_type = other DNA
tcaatatttttaaaattcagctggcgaaaggcaa

SEQ ID NO: 864 - DNA, 40 bp, synthetic construct
  misc_feature 1..40: note = artificial DNA sequence
  source 1..40: mol_type = other DNA
gacttgcgcaagaacgggtattaactaatgcagaacgcgc

SEQ ID NO: 865 - DNA, 47 bp, synthetic construct
  misc_feature 1..47: note = artificial DNA sequence
  source 1..47: mol_type = other DNA
atacatggagttttaataaacagttaatgcctaaaggttcgcctgat

SEQ ID NO: 866 - DNA, 47 bp, synthetic construct
  misc_feature 1..47: note = artificial DNA sequence
  source 1..47: mol_type = other DNA
tagaagaactcaaacctttgattaaattaaccgttgtagttacactg

SEQ ID NO: 867 - DNA, 31 bp, synthetic construct
  misc_feature 1..31: note = artificial DNA sequence
  source 1..31: mol_type = other DNA
ctgattgtttggatttcctgattttgctttg

SEQ ID NO: 868 - DNA, 40 bp, synthetic construct
  misc_feature 1..40: note = artificial DNA sequence
  source 1..40: mol_type = other DNA
acgctaacgagcgtctacagccatttttgtttccgtgagc

SEQ ID NO: 869 - DNA, 40 bp, synthetic construct
  misc_feature 1..40: note = artificial DNA sequence
  source 1..40: mol_type = other DNA
aatcaatatacagtaaataccaagtttgctcaatttcgga

SEQ ID NO: 870 - DNA, 43 bp, synthetic construct
  misc_feature 1..43: note = artificial DNA sequence
  source 1..43: mol_type = other DNA
accaatttttgtaccgcactccgttttagtttttgaacctccc

SEQ ID NO: 871 - DNA, 31 bp, synthetic construct
  misc_feature 1..31: note = artificial DNA sequence
  source 1..31: mol_type = other DNA
ggattaggattgagccagctttttaaatcac

SEQ ID NO: 872 - DNA, 43 bp, synthetic construct
  misc_feature 1..43: note = artificial DNA sequence
  source 1..43: mol_type = other DNA
caacaatatctttccttatcattcggaggttttaccgcgccca

SEQ ID NO: 873 - DNA, 40 bp, synthetic construct
  misc_feature 1..40: note = artificial DNA sequence
  source 1..40: mol_type = other DNA
tagcccccacctattattctgaaatcaattactcgcgcag

SEQ ID NO: 874 - DNA, 47 bp, synthetic construct
  misc_feature 1..47: note = artificial DNA sequence
  source 1..47: mol_type = other DNA
ttattaggagtgtactggtaatacttttgatcggataagccggaata

SEQ ID NO: 875 - DNA, 35 bp, synthetic construct
  misc_feature 1..35: note = artificial DNA sequence
  source 1..35: mol_type = other DNA
aatcaatatcgacaataaacaacttttttgttcag

SEQ ID NO: 876 - DNA, 44 bp, synthetic construct
  misc_feature 1..44: note = artificial DNA sequence
  source 1..44: mol_type = other DNA
atgtgagtttgggttatattttttactatatgtaaatattcatt

SEQ ID NO: 877 - DNA, 43 bp, synthetic construct
  misc_feature 1..43: note = artificial DNA sequence
  source 1..43: mol_type = other DNA
tcaatccggcgctcactgcatcagcggtcatagcagcaagcgg

SEQ ID NO: 878 - DNA, 48 bp, synthetic construct
  misc_feature 1..48: note = artificial DNA sequence
  source 1..48: mol_type = other DNA
gtatgagccgggtcacggatcccccgcctgtgcactcatagagagggt

SEQ ID NO: 879 - DNA, 43 bp, synthetic construct
  misc_feature 1..43: note = artificial DNA sequence
  source 1..43: mol_type = other DNA
tcgtcaccccaccagagcctttttccgccagcattgacaggag

SEQ ID NO: 880 - DNA, 49 bp, synthetic construct
  misc_feature 1..49: note = artificial DNA sequence
  source 1..49: mol_type = other DNA
aggtcagacgattttgacgctcaagaaggagcatggcaattcatggcaa

SEQ ID NO: 881 - DNA, 48 bp, synthetic construct
  misc_feature 1..48: note = artificial DNA sequence
  source 1..48: mol_type = other DNA
ctgagcaaaaattaattacatttaacaatttcctgtttataggcgaat

SEQ ID NO: 882 - DNA, 40 bp, synthetic construct
  misc_feature 1..40: note = artificial DNA sequence
  source 1..40: mol_type = other DNA
cggaagcataaagtgtcatagctgacagttgatgttgccc

SEQ ID NO: 883 - DNA, 48 bp, synthetic construct
  misc_feature 1..48: note = artificial DNA sequence
  source 1..48: mol_type = other DNA
tcgtcataaacatcccagtaacagtgtttttattgtccagtaagcgtc

SEQ ID NO: 884 - DNA, 47 bp, synthetic construct
  misc_feature 1..47: note = artificial DNA sequence
  source 1..47: mol_type = other DNA
aactgcatataacagttttcgcaaaaaaagatggtctttacaaaata

SEQ ID NO: 885 - DNA, 39 bp, synthetic construct
  misc_feature 1..39: note = artificial DNA sequence
  source 1..39: mol_type = other DNA
aataggaatgtagccagctttcatcaacattggcatagt

SEQ ID NO: 886 - DNA, 46 bp, synthetic construct
  misc_feature 1..46: note = artificial DNA sequence
  source 1..46: mol_type = other DNA
agacaatctggccaaaagaatacctaacaactatctaacggccaga

SEQ ID NO: 887 - DNA, 19 bp, synthetic construct
  misc_feature 1..19: note = artificial DNA sequence
  source 1..19: mol_type = other DNA
ctattagtctttgtggcac

SEQ ID NO: 888 - DNA, 50 bp, synthetic construct
  misc_feature 1..50: note = artificial DNA sequence
  source 1..50: mol_type = other DNA
ctggaggtgtccagcatctttttgcggggtcattgcaggcgctttcgcac

SEQ ID NO: 889 - DNA, 46 bp, synthetic construct
  misc_feature 1..46: note = artificial DNA sequence
  source 1..46: mol_type = other DNA
ccatcccacgcaaccagcttacggtaatgaatcagcgtggccagcg

SEQ ID NO: 890 - DNA, 39 bp, synthetic construct
  misc_feature 1..39: note = artificial DNA sequence
  source 1..39: mol_type = other DNA
ccactacgaatacactaaaacacgccacgcttagagagt

SEQ ID NO: 891 - DNA, 48 bp, synthetic construct
  misc_feature 1..48: note = artificial DNA sequence
  source 1..48: mol_type = other DNA
ttgctcctcgcagacggacccccaattaaacgggtaaaatacgtaatg

SEQ ID NO: 892 - DNA, 40 bp, synthetic construct
  misc_feature 1..40: note = artificial DNA sequence
  source 1..40: mol_type = other DNA
atcctgtccatcacgcagtaataacatttttcacttggaa

SEQ ID NO: 893 - DNA, 39 bp, synthetic construct
  misc_feature 1..39: note = artificial DNA sequence
  source 1..39: mol_type = other DNA
agtacaacggactaaagactttttcatgaggaagtttcc

SEQ ID NO: 894 - DNA, 44 bp, synthetic construct
  misc_feature 1..44: note = artificial DNA sequence
  source 1..44: mol_type = other DNA
cgattaatttttgggatttttaaacatttttgaggctttgagga

SEQ ID NO: 895 - DNA, 41 bp, synthetic construct
  misc_feature 1..41: note = artificial DNA sequence
  source 1..41: mol_type = other DNA
gcgattataccaagcggtccatttttgcggattagctcaac

SEQ ID NO: 896 - DNA, 38 bp, synthetic construct
  misc_feature 1..38: note = artificial DNA sequence
  source 1..38: mol_type = other DNA
ggcttagagcttaatttcatctttgtcaatcataaggg

SEQ ID NO: 897 - DNA, 37 bp, synthetic construct
  misc_feature 1..37: note = artificial DNA sequence
  source 1..37: mol_type = other DNA
ttccagtcgggaaacctttttttcgtgccagctgcat

SEQ ID NO: 898 - DNA, 48 bp, synthetic construct
  misc_feature 1..48: note = artificial DNA sequence
  source 1..48: mol_type = other DNA
agaggcggcggtggtgcaagaatgccaacggctctaaagcaggaattg

SEQ ID NO: 899 - DNA, 35 bp, synthetic construct
  misc_feature 1..35: note = artificial DNA sequence
  source 1..35: mol_type = other DNA
ttgcggaacaaagatttttaccaccatcgtctgaa

SEQ ID NO: 900 - DNA, 40 bp, synthetic construct
  misc_feature 1..40: note = artificial DNA sequence
  source 1..40: mol_type = other DNA
cgccatcaaaaataatatttttgtattatagtacacgacc

SEQ ID NO: 901 - DNA, 48 bp, synthetic construct
  misc_feature 1..48: note = artificial DNA sequence
  source 1..48: mol_type = other DNA
aaaaatcataagaggatttaccaggacagatgaacggtgtgaacgagg

SEQ ID NO: 902 - DNA, 48 bp, synthetic construct
  misc_feature 1..48: note = artificial DNA sequence
  source 1..48: mol_type = other DNA
acgaaagagcacatcctcataacgccgtttttttagagcctattagac

SEQ ID NO: 903 - DNA, 49 bp, synthetic construct
  misc_feature 1..49: note = artificial DNA sequence
  source 1..49: mol_type = other DNA
aaccgactcaatatcttgagagccacaccgcctgcaacagtgctgaata

SEQ ID NO: 904 - DNA, 40 bp, synthetic construct
  misc_feature 1..40: note = artificial DNA sequence
  source 1..40: mol_type = other DNA
tagaacgtcggccaacagtgagacgggcaacaaaaagaat

SEQ ID NO: 905 - DNA, 36 bp, synthetic construct
  misc_feature 1..36: note = artificial DNA sequence
  source 1..36: mol_type = other DNA
attgcatcatgtaaaagggacattatttttgaatgg

SEQ ID NO: 906 - DNA, 32 bp, synthetic construct
  misc_feature 1..32: note = artificial DNA sequence
  source 1..32: mol_type = other DNA
aagtttcaacctttaatccaacagtgaaagag

SEQ ID NO: 907 - DNA, 47 bp, synthetic construct
  misc_feature 1..47: note = artificial DNA sequence
  source 1..47: mol_type = other DNA
ttcatagccctaaaacatcgccatagtattaagcagcaaatgaaaaa

SEQ ID NO: 908 - DNA, 47 bp, synthetic construct
  misc_feature 1..47: note = artificial DNA sequence
  source 1..47: mol_type = other DNA
ccgaacgatctgacctgaaagcgtcagagatatttacaaacaataag

SEQ ID NO: 909 - DNA, 44 bp, synthetic construct
  misc_feature 1..44: note = artificial DNA sequence
  source 1..44: mol_type = other DNA
cgagtagtaaattgggcttgatcaagagtaatcttgggctttga

SEQ ID NO: 910 - DNA, 40 bp, synthetic construct
  misc_feature 1..40: note = artificial DNA sequence
  source 1..40: mol_type = other DNA
aaacgatgctgatcccagcccgaggagtccactattaaag

SEQ ID NO: 911 - DNA, 42 bp, synthetic construct
  misc_feature 1..42: note = artificial DNA sequence
  source 1..42: mol_type = other DNA
acgatccacgagtaaaagagtaatatctttttggtcagttgg

SEQ ID NO: 912 - DNA, 42 bp, synthetic construct; identical to SEQ ID NO: 702
  misc_feature 1..42: note = artificial DNA sequence
  source 1..42: mol_type = other DNA

SEQ ID NO: 913 - DNA, 45 bp, synthetic construct
  misc_feature 1..45: note = artificial DNA sequence
  source 1..45: mol_type = other DNA
cagcaggctttttaaaatcctgtttgataagccggcgaacgtggc

SEQ ID NO: 914 - DNA, 42 bp, synthetic construct
  misc_feature 1..42: note = artificial DNA sequence
  source 1..42: mol_type = other DNA
gtgccggccgggtttttttcctgcagtgctggtctggtcagc

SEQ ID NO: 915 - DNA, 38 bp, synthetic construct
  misc_feature 1..38: note = artificial DNA sequence
  source 1..38: mol_type = other DNA
gctgaacctcaaatatcaaatttttcctcacatcagat

SEQ ID NO: 916 - DNA, 59 bp, synthetic construct
  misc_feature 1..59: note = artificial DNA sequence
  source 1..59: mol_type = other DNA
tcgtctcgcctttagtgatgaaggttgggcggattaaatcctttgaaccaccacacccg

SEQ ID NO: 917 - DNA, 34 bp, synthetic construct
  misc_feature 1..34: note = artificial DNA sequence
  source 1..34: mol_type = other DNA
tggattataacaggaaaatttttcgctcatggaa

SEQ ID NO: 918 - DNA, 42 bp, synthetic construct
  misc_feature 1..42: note = artificial DNA sequence
  source 1..42: mol_type = other DNA
ccacgctggtttgtgccgttccggcattttcaccgcgcgggg

SEQ ID NO: 919 - DNA, 54 bp, synthetic construct
  misc_feature 1..54: note = artificial DNA sequence
  source 1..54: mol_type = other DNA
atcaccttgataaaacagaggtgaggcggtctaaaaataaggaaggttaataga

SEQ ID NO: 920 - DNA, 48 bp, synthetic construct
  misc_feature 1..48: note = artificial DNA sequence
  source 1..48: mol_type = other DNA
tattactttttgccagataatacacaaatcaacggacttgagcaaccg

SEQ ID NO: 921 - DNA, 43 bp, synthetic construct
  misc_feature 1..43: note = artificial DNA sequence
  source 1..43: mol_type = other DNA
cgccatgaacgtggactttttccaacgtcaaatcggcaaaatc

SEQ ID NO: 922 - DNA, 47 bp, synthetic construct
  misc_feature 1..47: note = artificial DNA sequence
  source 1..47: mol_type = other DNA
acgacgataaaaaaaaaagccgccaaagcggtaggagcaaatgcgcg

SEQ ID NO: 923 - DNA, 52 bp, synthetic construct
  misc_feature 1..52: note = artificial DNA sequence
  source 1..52: mol_type = other DNA
gaaccctttacattggcagatttatcattaattttaaaagtttgctcacgga

SEQ ID NO: 924 - DNA, 39 bp, synthetic construct
  misc_feature 1..39: note = artificial DNA sequence
  source 1..39: mol_type = other DNA
acaggcggtcgctggcagcactgaccaacttgtcaggat

SEQ ID NO: 925 - DNA, 40 bp, synthetic construct
  misc_feature 1..40: note = artificial DNA sequence
  source 1..40: mol_type = other DNA
tcccggaatttgtgagagatagactttctccgcgcagaaa

SEQ ID NO: 926 - DNA, 39 bp, synthetic construct
  misc_feature 1..39: note = artificial DNA sequence
  source 1..39: mol_type = other DNA
gtgtagcggtttttcacgctgcgcaaacttaaatttggg

SEQ ID NO: 927 - DNA, 48 bp, synthetic construct
  misc_feature 1..48: note = artificial DNA sequence
  source 1..48: mol_type = other DNA
ttgtgtacaaaagagatggtgaagggatagcttcgcgtctggccttcc

SEQ ID NO: 928 - DNA, 30 bp, synthetic construct
  misc_feature 1..30: note = artificial DNA sequence
  source 1..30: mol_type = other DNA
gtcaatagccattgcaccaccagcacctga

SEQ ID NO: 929 - DNA, 39 bp, synthetic construct
  misc_feature 1..39: note = artificial DNA sequence
  source 1..39: mol_type = other DNA
tttaccagaagaatttttagcgaatcggcgaaacgtaca

SEQ ID NO: 930 - DNA, 40 bp, synthetic construct
  misc_feature 1..40: note = artificial DNA sequence
  source 1..40: mol_type = other DNA
cttttgcataccagtcagcccgaacagaccggaagcaaac

SEQ ID NO: 931 - DNA, 40 bp, synthetic construct
  misc_feature 1..40: note = artificial DNA sequence
  source 1..40: mol_type = other DNA
aaaatctaccaaaaggaattacgaaaatgtgatactgcgg

SEQ ID NO: 932 - DNA, 36 bp, synthetic construct
  misc_feature 1..36: note = artificial DNA sequence
  source 1..36: mol_type = other DNA
gcgagtaacaacctaacgcgttaataaaacgaacta

SEQ ID NO: 933 - DNA, 48 bp, synthetic construct
  misc_feature 1..48: note = artificial DNA sequence
  source 1..48: mol_type = other DNA
atcgacataaaaaaatcccgtaacccctgacttaaatcagttaaaatt

SEQ ID NO: 934 - DNA, 49 bp, synthetic construct
  misc_feature 1..49: note = artificial DNA sequence
  source 1..49: mol_type = other DNA
actttaattttttcattctgacgagccaaatcaacgtaacagcagcgaa

SEQ ID NO: 935 - DNA, 46 bp, synthetic construct
  misc_feature 1..46: note = artificial DNA sequence
  source 1..46: mol_type = other DNA
gcgcatcgtaaccgtaattgcgacgatgaacagagtctggagtaga

SEQ ID NO: 936 - DNA, 46 bp, synthetic construct
  misc_feature 1..46: note = artificial DNA sequence
  source 1..46: mol_type = other DNA
aaagaagttttgccagatttttggggtaccttatgcgttttttttt

SEQ ID NO: 937 - DNA, 49 bp, synthetic construct
  misc_feature 1..49: note = artificial DNA sequence
  source 1..49: mol_type = other DNA
tttaattcaaaaaggctttttcacgttgaaaaatagtaaaatgagatgg

SEQ ID NO: 938 - DNA, 47 bp, synthetic construct
  misc_feature 1..47: note = artificial DNA sequence
  source 1..47: mol_type = other DNA
cgattgagcagtatgtctttccagctggtgccggaaaccaggcaaag

SEQ ID NO: 939 - DNA, 32 bp, synthetic construct
  misc_feature 1..32: note = artificial DNA sequence
  source 1..32: mol_type = other DNA
accagagccatcgataggccggaatggtttga

SEQ ID NO: 940 - DNA, 40 bp, synthetic construct
  misc_feature 1..40: note = artificial DNA sequence
  source 1..40: mol_type = other DNA
gcttagatcagggagttaaaggcccggtcgctgaggcttg

SEQ ID NO: 941 - DNA, 34 bp, synthetic construct
  misc_feature 1..34: note = artificial DNA sequence
  source 1..34: mol_type = other DNA
ctttttcagtaatcagtagcgactcctcaagaga

SEQ ID NO: 942 - DNA, 48 bp, synthetic construct
  misc_feature 1..48: note = artificial DNA sequence
  source 1..48: mol_type = other DNA
aatccaatcgcaagacggcttagggaataaccttgcttctgtaaatcg

SEQ ID NO: 943 - DNA, 40 bp, synthetic construct
  misc_feature 1..40: note = artificial DNA sequence
  source 1..40: mol_type = other DNA
atcaggtccggtttataaggaacaactaaagggcatctgc

SEQ ID NO: 944 - DNA, 46 bp, synthetic construct
  misc_feature 1..46: note = artificial DNA sequence
  source 1..46: mol_type = other DNA
gtaaacgttttttaatattttgctcattttttatattcattgaatc

SEQ ID NO: 945 - DNA, 41 bp, synthetic construct
  misc_feature 1..41: note = artificial DNA sequence
  source 1..41: mol_type = other DNA
tctccgtgggaacaaacaggaataccacattcaacattatt

SEQ ID NO: 946 - DNA, 33 bp, synthetic construct
  misc_feature 1..33: note = artificial DNA sequence
  source 1..33: mol_type = other DNA
aacagtacgggagggaagacagcccctacaacg

SEQ ID NO: 947 - DNA, 39 bp, synthetic construct
  misc_feature 1..39: note = artificial DNA sequence
  source 1..39: mol_type = other DNA
cattcaacatcaccgtatgattaaaataccgagaaaaag

SEQ ID NO: 948 - DNA, 40 bp, synthetic construct
  misc_feature 1..40: note = artificial DNA sequence
  source 1..40: mol_type = other DNA
agtacaaatcatagttagcgtaacgatctcaaaagggcga

SEQ ID NO: 949 - DNA, 49 bp, synthetic construct
  misc_feature 1..49: note = artificial DNA sequence
  source 1..49: mol_type = other DNA
agtaagtcaataacctgtttatttttctatattttctttagtttgacca

SEQ ID NO: 950 - DNA, 37 bp, synthetic construct
  misc_feature 1..37: note = artificial DNA sequence
  source 1..37: mol_type = other DNA
gcgcgagcgcaaatatccaaaaacaggaagattttct

SEQ ID NO: 951 - DNA, 49 bp, synthetic construct
  misc_feature 1..49: note = artificial DNA sequence
  source 1..49: mol_type = other DNA
taatatcagtagaaaagaactggccaccgactccattaccagagccgcc

SEQ ID NO: 952 - DNA, 40 bp, synthetic construct
  misc_feature 1..40: note = artificial DNA sequence
  source 1..40: mol_type = other DNA
gagccaccacccttggtttaccagcgtttttcaaagacaa

SEQ ID NO: 953 - DNA, 48 bp, synthetic construct
  misc_feature 1..48: note = artificial DNA sequence
  source 1..48: mol_type = other DNA
tcaccggacgttttcatgcctttagcgtcagaatcaaaatttagttaa

SEQ ID NO: 954 - DNA, 48 bp, synthetic construct
  misc_feature 1..48: note = artificial DNA sequence
  source 1..48: mol_type = other DNA
tagatacatgattcccaattttttctgcgaacgagcaaacccgttcta

SEQ ID NO: 955 - DNA, 48 bp, synthetic construct
  misc_feature 1..48: note = artificial DNA sequence
  source 1..48: mol_type = other DNA
ttctaagaacgcgaggatcgagaacaagcgaaaattctgtccagacga

SEQ ID NO: 956 - DNA, 46 bp, synthetic construct
  misc_feature 1..46: note = artificial DNA sequence
  source 1..46: mol_type = other DNA
taaaactagcatacgagaatagacagcttgctttacctaaatttaa

SEQ ID NO: 957 - DNA, 40 bp, synthetic construct
  misc_feature 1..40: note = artificial DNA sequence
  source 1..40: mol_type = other DNA
taccccggttgatacagttcagaaaagagaatataataat

SEQ ID NO: 958 - DNA, 40 bp, synthetic construct
  misc_feature 1..40: note = artificial DNA sequence
  source 1..40: mol_type = other DNA
tccaaaaggagcctttaccgataggctgataaaatgtgta

SEQ ID NO: 959 - DNA, 38 bp, synthetic construct
  misc_feature 1..38: note = artificial DNA sequence
  source 1..38: mol_type = other DNA
aattgtatattgcctgggtaatcgaatcataatttggg

SEQ ID NO: 960 - DNA, 47 bp, synthetic construct
  misc_feature 1..47: note = artificial DNA sequence
  source 1..47: mol_type = other DNA
gcgttaaaatcagatatagaaaaatacatacataaaggtggcaacat

SEQ ID NO: 961 - DNA, 46 bp, synthetic construct
  misc_feature 1..46: note = artificial DNA sequence
  source 1..46: mol_type = other DNA
agactttttttaaatatcgcgtaacgagaatttttgaccataaatc

SEQ ID NO: 962 - DNA, 34 bp, synthetic construct
  misc_feature 1..34: note = artificial DNA sequence
  source 1..34: mol_type = other DNA
cggaacaactaattttttgcagatacacgtcgga

SEQ ID NO: 963 - DNA, 46 bp, synthetic construct
  misc_feature 1..46: note = artificial DNA sequence
  source 1..46: mol_type = other DNA
ttagcaaaaaaggctgtagctaggtgaatttgagaagatagcgata

SEQ ID NO: 964 - DNA, 45 bp, synthetic construct
  misc_feature 1..45: note = artificial DNA sequence
  source 1..45: mol_type = other DNA
cattatgacctgcaactatttttagtacggtgtctggtaatgctg

SEQ ID NO: 965 - DNA, 40 bp, synthetic construct
  misc_feature 1..40: note = artificial DNA sequence
  source 1..40: mol_type = other DNA
acgtcacctcattaaacgcactaatagtagtagcattaac

SEQ ID NO: 966 - DNA, 32 bp, synthetic construct
  misc_feature 1..32: note = artificial DNA sequence
  source 1..32: mol_type = other DNA
ggtaaagttaaacaccggaatcatccaggctt

SEQ ID NO: 967 - DNA, 44 bp, synthetic construct
  misc_feature 1..44: note = artificial DNA sequence
  source 1..44: mol_type = other DNA
cgacaaaacgagaaaataaataagcagtagcatgagccatttgg

SEQ ID NO: 968 - DNA, 44 bp, synthetic construct
  misc_feature 1..44: note = artificial DNA sequence
  source 1..44: mol_type = other DNA
acaatgacaacaaccatctccaaagagctttttttaaagcgaac

SEQ ID NO: 969 - DNA, 38 bp, synthetic construct
  misc_feature 1..38: note = artificial DNA sequence
  source 1..38: mol_type = other DNA
tgttttaaatactgggtaaagattcaaaaggcataacc

SEQ ID NO: 970 - DNA, 48 bp, synthetic construct
  misc_feature 1..48: note = artificial DNA sequence
  source 1..48: mol_type = other DNA
ttctgcgatttttgagccctcataacgcaaggataaaaatctgtagcg

SEQ ID NO: 971 - DNA, 46 bp, synthetic construct
  misc_feature 1..46: note = artificial DNA sequence
  source 1..46: mol_type = other DNA
tcagagccaccacccctccctcattagcaagcagcaccaatatatt

SEQ ID NO: 972 - DNA, 40 bp, synthetic construct
  misc_feature 1..40: note = artificial DNA sequence
  source 1..40: mol_type = other DNA
atccggtagagggtaattgagcgccgccattcttattttg

SEQ ID NO: 973 - DNA, 47 bp, synthetic construct
  misc_feature 1..47: note = artificial DNA sequence
  source 1..47: mol_type = other DNA
cataggtctaattaattttcccttagaatcctgtataaagtttcatc

SEQ ID NO: 974 - DNA, 40 bp, synthetic construct
  misc_feature 1..40: note = artificial DNA sequence
  source 1..40: mol_type = other DNA
gcctgatatcgcccacggtgagaaaggctttttggagaca

SEQ ID NO: 975 - DNA, 32 bp, synthetic construct
  misc_feature 1..32: note = artificial DNA sequence
  source 1..32: mol_type = other DNA
tgggatagtatcggcctcaggaaggaggggac

SEQ ID NO: 976 - DNA, 40 bp, synthetic construct
  misc_feature 1..40: note = artificial DNA sequence
  source 1..40: mol_type = other DNA
attccacaggtaaatatggcatcaattctcaccagaacca

SEQ ID NO: 977 - DNA, 39 bp, synthetic construct
  misc_feature 1..39: note = artificial DNA sequence
  source 1..39: mol_type = other DNA
taatacttttgcgggagaagccttcggttgtcggagagg

SEQ ID NO: 978 - DNA, 48 bp, synthetic construct
  misc_feature 1..48: note = artificial DNA sequence
  source 1..48: mol_type = other DNA
gtatgggtttatcgcactccagccagctttccgggttaagccactttc

SEQ ID NO: 979 - DNA, 47 bp, synthetic construct
  misc_feature 1..47: note = artificial DNA sequence
  source 1..47: mol_type = other DNA
acggctacagaacaagaactttttggatattcattacaaacaccaga

SEQ ID NO: 980 - DNA, 44 bp, synthetic construct
  misc_feature 1..44: note = artificial DNA sequence
  source 1..44: mol_type = other DNA
ggagatttttttgtatcatcagacagcatcggaacgagggtagc

SEQ ID NO: 981 - DNA, 54 bp, synthetic construct
  misc_feature 1..54: note = artificial DNA sequence
  source 1..54: mol_type = other DNA
acaggtagggcttgccgtgaattaaattgtgtcgaaatctttttgcgacctgct

SEQ ID NO: 982 - DNA, 56 bp, synthetic construct
  misc_feature 1..56: note = artificial DNA sequence
  source 1..56: mol_type = other DNA
gaaattatagatctacattaagcaataaacaccggaaccgctcagagcggtgaatt

SEQ ID NO: 983 - DNA, 39 bp, synthetic construct
  misc_feature 1..39: note = artificial DNA sequence
  source 1..39: mol_type = other DNA
taccttttgagacagaatcaagtttcggcattttcggtc

SEQ ID NO: 984 - DNA, 40 bp, synthetic construct
  misc_feature 1..40: note = artificial DNA sequence
  source 1..40: mol_type = other DNA
aatgaaaccacgcctcagagcataaagctaaattatttca

SEQ ID NO: 985 - DNA, 42 bp, synthetic construct
  misc_feature 1..42: note = artificial DNA sequence
  source 1..42: mol_type = other DNA
tttgataagaggtaaatcactttttatcaatatgatattcaa

SEQ ID NO: 986 - DNA, 37 bp, synthetic construct
  misc_feature 1..37: note = artificial DNA sequence
  source 1..37: mol_type = other DNA
ccctcaaatgcttgtcacgttggtgttttgaccgtaa

SEQ ID NO: 987 - DNA, 48 bp, synthetic construct
  misc_feature 1..48: note = artificial DNA sequence
  source 1..48: mol_type = other DNA
gcctgagtattaatgcaccaaaaacaggcaaggcaaagaaatccaata

SEQ ID NO: 988 - DNA, 39 bp, synthetic construct
  misc_feature 1..39: note = artificial DNA sequence
  source 1..39: mol_type = other DNA
tattttaaatgcaattaagacgctcttaaacagcttgat

SEQ ID NO: 989 - DNA, 49 bp, synthetic construct
  misc_feature 1..49: note = artificial DNA sequence
  source 1..49: mol_type = other DNA
atatcccatcctactctttcctgtgtgaaattgttatccgctcacctgt

SEQ ID NO: 990 - DNA, 49 bp, synthetic construct
  misc_feature 1..49: note = artificial DNA sequence
  source 1..49: mol_type = other DNA
tgccaattccacacaactagaaaccgctattttaaagaaataagttggg

SEQ ID NO: 991 - DNA, 56 bp, synthetic construct
  misc_feature 1..56: note = artificial DNA sequence
  source 1..56: mol_type = other DNA
gggagaactcatttacgagcatgatacgagctcccaatcgcacccagctacaactt

SEQ ID NO: 992 - DNA, 41 bp, synthetic construct
  misc_feature 1..41: note = artificial DNA sequence
  source 1..41: mol_type = other DNA
ttagattttatcctgaactttacaggtaaaacgcagggttt

SEQ ID NO: 993 - DNA, 55 bp, synthetic construct
  misc_feature 1..55: note = artificial DNA sequence
  source 1..55: mol_type = other DNA
tttttaactcactcgaattcgtaatcatggtaaagcctgcttcgcgtcacccaaa

SEQ ID NO: 994 - DNA, 47 bp, synthetic construct
  misc_feature 1..47: note = artificial DNA sequence
  source 1..47: mol_type = other DNA
tcactgcggggtaccgtgcctgttgggtgcctaatgagtgagctcat

SEQ ID NO: 995 - DNA, 44 bp, synthetic construct
  misc_feature 1..44: note = artificial DNA sequence
  source 1..44: mol_type = other DNA
tttggccagttacaaaataattccagagtgaaccatgtggagcc

SEQ ID NO: 996 - DNA, 51 bp, synthetic construct
  misc_feature 1..51: note = artificial DNA sequence
  source 1..51: mol_type = other DNA
ccagaatcccagaatgcctaaaggtcaagtttcactacgcctaatttttct

SEQ ID NO: 997 - DNA, 44 bp, synthetic construct
  misc_feature 1..44: note = artificial DNA sequence
  source 1..44: mol_type = other DNA
tcttggctggctcttagccgacagaccataatttcaaagaactg

SEQ ID NO: 998 - DNA, 43 bp, synthetic construct
  misc_feature 1..43: note = artificial DNA sequence
  source 1..43: mol_type = other DNA
cgaaacaaccatgttagaccttcagatggttggcgcatatcct

SEQ ID NO: 999 - DNA, 40 bp, synthetic construct
  misc_feature 1..40: note = artificial DNA sequence
  source 1..40: mol_type = other DNA
tgagatcataaccctcgaggacgttgggaagagctcatta

SEQ ID NO: 1000 - DNA, 47 bp, synthetic construct
  misc_feature 1..47: note = artificial DNA sequence
  source 1..47: mol_type = other DNA
ggcaaaagaaggcaccaacctaaaagcaccgttttgcgtattgaagt

SEQ ID NO: 1001 - DNA, 47 bp, synthetic construct
  misc_feature 1..47: note = artificial DNA sequence
  source 1..47: mol_type = other DNA
taacggcgccagggtggtttttcaacgcggtgaacgtgccagttgaa

SEQ ID NO: 1002 - DNA, 50 bp, synthetic construct
  misc_feature 1..50: note = artificial DNA sequence
  source 1..50: mol_type = other DNA
agaaaggaactgctcatttgcctggaacaaatagggttgagtgttgacct

SEQ ID NO: 1003 - DNA, 36 bp, synthetic construct
  misc_feature 1..36: note = artificial DNA sequence
  source 1..36: mol_type = other DNA
taacttccagttgccagcaggtaaagtttttagaag

SEQ ID NO: 1004 - DNA, 40 bp, synthetic construct
  misc_feature 1..40: note = artificial DNA sequence
  source 1..40: mol_type = other DNA
tgtctgtaatttaggcataaagtactcgctattgagagac

SEQ ID NO: 1005 - DNA, 48 bp, synthetic construct
  misc_feature 1..48: note = artificial DNA sequence
  source 1..48: mol_type = other DNA
gagagataataataaccagaaggccatatttaacaacgccaacaaggt

SEQ ID NO: 1006 - DNA, 31 bp, synthetic construct
  misc_feature 1..31: note = artificial DNA sequence
  source 1..31: mol_type = other DNA
tcaattacggaatacaattactaccgtgtga

SEQ ID NO: 1007 - DNA, 46 bp, synthetic construct
  misc_feature 1..46: note = artificial DNA sequence
  source 1..46: mol_type = other DNA
gactccttgaaacgcaacccacaagcagatagccgaacaaagaagt

SEQ ID NO: 1008 - DNA, 40 bp, synthetic construct
  misc_feature 1..40: note = artificial DNA sequence
  source 1..40: mol_type = other DNA
gagaatagaggcattttcgagccccaacgctcaacaaact

SEQ ID NO: 1009 - DNA, 34 bp, synthetic construct
  misc_feature 1..34: note = artificial DNA sequence
  source 1..34: mol_type = other DNA
tctcgtagggcttaattgtatcatatgcgttatt

SEQ ID NO: 1010 - DNA, 49 bp, synthetic construct
  misc_feature 1..49: note = artificial DNA sequence
  source 1..49: mol_type = other DNA
agtaataacctgtttagagaatcgaaaccgagtaccgaagccctttggt

SEQ ID NO: 1011 - DNA, 48 bp, synthetic construct
  misc_feature 1..48: note = artificial DNA sequence
  source 1..48: mol_type = other DNA
taggtttaagaaaagtaagaattgacaccgcttacgttagtaaatgaa

SEQ ID NO: 1012 - DNA, 40 bp, synthetic construct
  misc_feature 1..40: note = artificial DNA sequence
  source 1..40: mol_type = other DNA
ttcttaccatgaaaacagtcaatagtgaatttttttagaa

SEQ ID NO: 1013 - DNA, 42 bp, synthetic construct
  misc_feature 1..42: note = artificial DNA sequence
  source 1..42: mol_type = other DNA
taaacaatgaaatagcaatagctatctattttcagcggagtg

SEQ ID NO: 1014 - DNA, 42 bp, synthetic construct
  misc_feature 1..42: note = artificial DNA sequence
  source 1..42: mol_type = other DNA
ttggtcaatcatatgcagattttgctaaacacaataataagt

SEQ ID NO: 1015 - DNA, 49 bp, synthetic construct
  misc_feature 1..49: note = artificial DNA sequence
  source 1..49: mol_type = other DNA
ttgcgccggatatattgcttttgcgggatcgtcaccctcaaagctgctt

SEQ ID NO: 1016 - DNA, 30 bp, synthetic construct
  misc_feature 1..30: note = artificial DNA sequence
  source 1..30: mol_type = other DNA
tagctcagtgaataaaaagattcatctaat

SEQ ID NO: 1017 - DNA, 39 bp, synthetic construct
  misc_feature 1..39: note = artificial DNA sequence
  source 1..39: mol_type = other DNA
ttgagatttggcggattagactggatagtttttgtccaa

SEQ ID NO: 1018 - DNA, 58 bp, synthetic construct
  misc_feature 1..58: note = artificial DNA sequence
  source 1..58: mol_type = other DNA
gcagtagagtaggtagagattaggcacatcatataacccatggttgaggcacgccgcc

SEQ ID NO: 1019 - DNA, 58 bp, synthetic construct
  misc_feature 1..58: note = artificial DNA sequence
  source 1..58: mol_type = other DNA
gcagtagagtaggtagagattaggcatcccagtcatacattttcagggatcactgagt

SEQ ID NO: 1020 - DNA, 50 bp, synthetic construct
  misc_feature 1..50: note = artificial DNA sequence
  source 1..50: mol_type = other DNA
gcagtagagtaggtagagattaggcaggcgctagggcgctcagagcttga

SEQ ID NO: 1021 - DNA, 65 bp, synthetic construct
  misc_feature 1..65: note = artificial DNA sequence
  source 1..65: mol_type = other DNA
gcagtagagtaggtagagattaggcacgcattaaagtaacatcaccagtccagtcgacaactcgt

SEQ ID NO: 1022 - DNA, 50 bp, synthetic construct
  misc_feature 1..50: note = artificial DNA sequence
  source 1..50: mol_type = other DNA
gcagtagagtaggtagagattaggcacagcggatcgtcccgaacgttatt

SEQ ID NO: 1023 - DNA, 61 bp, synthetic construct
  misc_feature 1..61: note = artificial DNA sequence
  source 1..61: mol_type = other DNA
gcagtagagtaggtagagattaggcaaatcgtcataaaaccgcgagaggaagagcaacact

SEQ ID NO: 1024 - DNA, 50 bp, synthetic construct
  misc_feature 1..50: note = artificial DNA sequence
  source 1..50: mol_type = other DNA
gcagtagagtaggtagagattaggcacctgtagcttgtataatgaaaagg

SEQ ID NO: 1025 - DNA, 57 bp, synthetic construct
  misc_feature 1..57: note = artificial DNA sequence
  source 1..57: mol_type = other DNA
gcagtagagtaggtagagattaggcagacgacagtaaaatcagaaaagccttaaatt

SEQ ID NO: 1026 - DNA, 50 bp, synthetic construct
  misc_feature 1..50: note = artificial DNA sequence
  source 1..50: mol_type = other DNA
gcagtagagtaggtagagattaggcatcaaaagttttgtcgttagcaaac

SEQ ID NO: 1027 - DNA, 32 bp, synthetic construct
  misc_feature 1..32: note = artificial DNA sequence
  source 1..32: mol_type = other DNA
aaaatcctgtttgaaacagtgtagcggtcacg

SEQ ID NO: 1028 - DNA, 46 bp, synthetic construct
  misc_feature 1..46: note = artificial DNA sequence
  source 1..46: mol_type = other DNA
aacaaaattttcaatttttcagggacactgagatgatacaggaggt

SEQ ID NO: 1029 - DNA, 48 bp, synthetic construct
  misc_feature 1..48: note = artificial DNA sequence
  source 1..48: mol_type = other DNA
atcaagaaacgcgaggcgtttgctatccggtattctaagagcactcat

SEQ ID NO: 1030 - DNA, 39 bp, synthetic construct
  misc_feature 1..39: note = artificial DNA sequence
  source 1..39: mol_type = other DNA
gcgcatcgggagaaattttagacaccctcagtgagtaac

SEQ ID NO: 1031 - DNA, 39 bp, synthetic construct
  misc_feature 1..39: note = artificial DNA sequence
  source 1..39: mol_type = other DNA
ttcccttagaatccttgaaaacatagtttttgatagctt

SEQ ID NO: 1032 - DNA, 40 bp, synthetic construct
  misc_feature 1..40: note = artificial DNA sequence
  source 1..40: mol_type = other DNA
atcaatatatgtgagttttgctcacaccctcatttcggaa

SEQ ID NO: 1033 - DNA, 48 bp, synthetic construct
  misc_feature 1..48: note = artificial DNA sequence
  source 1..48: mol_type = other DNA
ttgaatacgtaccgtaatagcaagcccaatagggaggttttttaacaa

SEQ ID NO: 1034 - DNA, 48 bp, synthetic construct
  misc_feature 1..48: note = artificial DNA sequence
  source 1..48: mol_type = other DNA
aaacaaacgttttcacgctgcggccagaatgcgaataacccaagtacc

SEQ ID NO: 1035 - DNA, 48 bp, synthetic construct
  misc_feature 1..48: note = artificial DNA sequence
  source 1..48: mol_type = other DNA
agaaggatattaagaggctgagacgctggtaacatggaaattctttga

SEQ ID NO: 1036 - DNA, 31 bp, synthetic construct
  misc_feature 1..31: note = artificial DNA sequence
  source 1..31: mol_type = other DNA
caccgtactcagcagcaccttttttaatcag

SEQ ID NO: 1037 - DNA, 38 bp, synthetic construct
  misc_feature 1..38: note = artificial DNA sequence
  source 1..38: mol_type = other DNA
tcgatagaacccatcaagttacaaaattgcaataacat

SEQ ID NO: 1038 - DNA, 39 bp, synthetic construct
  misc_feature 1..39: note = artificial DNA sequence
  source 1..39: mol_type = other DNA
ggagcgggaagaaattcagttgggcggttgtgtacatcg

SEQ ID NO: 1039 - DNA, 42 bp, synthetic construct
  misc_feature 1..42: note = artificial DNA sequence
  source 1..42: mol_type = other DNA
gccacgggaacggataacctcaccggtttttaacaatcggcg

SEQ ID NO: 1040 - DNA, 43 bp, synthetic construct
  misc_feature 1..43: note = artificial DNA sequence
  source 1..43: mol_type = other DNA
aaacagccataacctaacgagcgtttttctttccgtttgaaat

SEQ ID NO: 1041 - DNA, 40 bp, synthetic construct
  misc_feature 1..40: note = artificial DNA sequence
  source 1..40: mol_type = other DNA
cgcctgtagcattattattcattaaatttttgtgaattat

SEQ ID NO: 1042 - DNA, 46 bp, synthetic construct
  misc_feature 1..46: note = artificial DNA sequence
  source 1..46: mol_type = other DNA
aaaagaagtgctagcgaacctcccattaccgcgcccaatagcaggt

SEQ ID NO: 1043 - DNA, 40 bp, synthetic construct
  misc_feature 1..40: note = artificial DNA sequence
  source 1..40: mol_type = other DNA
ccgggggttcctcaagagcaatactacccgtataaacagt

SEQ ID NO: 1044 - DNA, 31 bp, synthetic construct
  misc_feature 1..31: note = artificial DNA sequence
  source 1..31: mol_type = other DNA
gcgtagattttcaggtcaaaattgccgatta

SEQ ID NO: 1045 - DNA, 48 bp, synthetic construct
  misc_feature 1..48: note = artificial DNA sequence
  source 1..48: mol_type = other DNA
ttctgccattcctgtggtcgggaatgagctaactcacattcacccaaa

SEQ ID NO: 1046 - DNA, 34 bp, synthetic construct
  misc_feature 1..34: note = artificial DNA sequence
  source 1..34: mol_type = other DNA
ggtaaatttttattgacggtcccggaatttgcaa

SEQ ID NO: 1047 - DNA, 56 bp, synthetic construct
  misc_feature 1..56: note = artificial DNA sequence
  source 1..56: mol_type = other DNA
acctgagcgattcgccggagaattttgagcgctaatatcaacagcggatctcacgg

SEQ ID NO: 1048 - DNA, 43 bp, synthetic construct
  misc_feature 1..43: note = artificial DNA sequence
  source 1..43: mol_type = other DNA
agacgttacaaataaatcctttttcattaaagccagaatggaa

SEQ ID NO: 1049 - DNA, 49 bp, synthetic construct
  misc_feature 1..49: note = artificial DNA sequence
  source 1..49: mol_type = other DNA
ctctgaatttaccataaaagggacatggaagggtaaaacagaagggcgc

SEQ ID NO: 1050 - DNA, 46 bp, synthetic construct
  misc_feature 1..46: note = artificial DNA sequence
  source 1..46: mol_type = other DNA
gtagttccagtaagcgtcatacattaagttttagccaccaccctca

SEQ ID NO: 1051 - DNA, 55 bp, synthetic construct
  misc_feature 1..55: note = artificial DNA sequence
  source 1..55: mol_type = other DNA
gctcatttcaaagtcacagtaccttttaaaaaacaggagatttgcacgttagaac

SEQ ID NO: 1052 - DNA, 40 bp, synthetic construct
  misc_feature 1..40: note = artificial DNA sequence
  source 1..40: mol_type = other DNA
agcgccatgtttaccaacgcagaagagagatattctccgt

SEQ ID NO: 1053 - DNA, 38 bp, synthetic construct
  misc_feature 1..38: note = artificial DNA sequence
  source 1..38: mol_type = other DNA
agcattgaccaccctcagaactttttgccaccctcaga

SEQ ID NO: 1054 - DNA, 47 bp, synthetic construct
  misc_feature 1..47: note = artificial DNA sequence
  source 1..47: mol_type = other DNA
aggagtgtactggtaaggcttttgtttcgtcaccagggacaataacg

SEQ ID NO: 1055 - DNA, 40 bp, synthetic construct
  misc_feature 1..40: note = artificial DNA sequence
  source 1..40: mol_type = other DNA
agtgcctacattttgacacgaccatacgccaggggagcta

SEQ ID NO: 1056 - DNA, 48 bp, synthetic construct
  misc_feature 1..48: note = artificial DNA sequence
  source 1..48: mol_type = other DNA
agcgccaaagatgagagatagactacccacaaaaaaacagggaagcgc

SEQ ID NO: 1057 - DNA, 32 bp, synthetic construct
  misc_feature 1..32: note = artificial DNA sequence
  source 1..32: mol_type = other DNA
agggcgaaaaaccgtcacataaaacgcgctta

SEQ ID NO: 1058 - DNA, 40 bp, synthetic construct
  misc_feature 1..40: note = artificial DNA sequence
  source 1..40: mol_type = other DNA
tatcagggcgctggcagtggcgaggaagtgttagagtctg

SEQ ID NO: 1059 - DNA, 39 bp, synthetic construct
  misc_feature 1..39: note = artificial DNA sequence
  source 1..39: mol_type = other DNA
cgatggcctgacggggaaagccgggggtgccccggaagc

SEQ ID NO: 1060 - DNA, 47 bp, synthetic construct
  misc_feature 1..47: note = artificial DNA sequence
  source 1..47: mol_type = other DNA
gaattgagttaagcccaaacgtacaagggctttttgacattcaaccg

SEQ ID NO: 1061 - DNA, 40 bp, synthetic construct
  misc_feature 1..40: note = artificial DNA sequence
  source 1..40: mol_type = other DNA
aataataagagcaatttttaaacaatgaaatagcaatagc

SEQ ID NO: 1062 - DNA, 48 bp, synthetic construct
  misc_feature 1..48: note = artificial DNA sequence
  source 1..48: mol_type = other DNA
cgctcaattccatcacttagtaatatagctgtgcacgcgtcagtgtca

SEQ ID NO: 1063 - DNA, 39 bp, synthetic construct
  misc_feature 1..39: note = artificial DNA sequence
  source 1..39: mol_type = other DNA
taatgcccatgaaagttaggattagcggggtggcgggcc

SEQ ID NO: 1064 - DNA, 39 bp, synthetic construct
  misc_feature 1..39: note = artificial DNA sequence
  source 1..39: mol_type = other DNA
aacaggaaaaacgcttatccagatcaaactatcggcctt

SEQ ID NO: 1065 - DNA, 44 bp, synthetic construct
  misc_feature 1..44: note = artificial DNA sequence
  source 1..44: mol_type = other DNA
ttcctcgttagaatcagagcaatcctgaaaaggaagcatacgag

SEQ ID NO: 1066 - DNA, 40 bp, synthetic construct
  misc_feature 1..40: note = artificial DNA sequence
  source 1..40: mol_type = other DNA
ctccctcacggataagtgccgtcgtggaaacatttcattt

SEQ ID NO: 1067 - DNA, 47 bp, synthetic construct
  misc_feature 1..47: note = artificial DNA sequence
  source 1..47: mol_type = other DNA
gagccgccctattattctgaaaccctgcctagaaccgccaccctcat

SEQ ID NO: 1068 - DNA, 45 bp, synthetic construct
  misc_feature 1..45: note = artificial DNA sequence
  source 1..45: mol_type = other DNA
taatgagacctgtcgtgccagctccagcggcctgttcttcgcgtc

SEQ ID NO: 1069 - DNA, 40 bp, synthetic construct
  misc_feature 1..40: note = artificial DNA sequence
  source 1..40: mol_type = other DNA
taggaatcgacttgcgattagacgtgattgctggtgaagg

SEQ ID NO: 1070 - DNA, 47 bp, synthetic construct
  misc_feature 1..47: note = artificial DNA sequence
  source 1..47: mol_type = other DNA
accctgaaaattgcgtatgccgctcacaattaccgttgtaggaacgg

SEQ ID NO: 1071 - DNA, 40 bp, synthetic construct
  misc_feature 1..40: note = artificial DNA sequence
  source 1..40: mol_type = other DNA
cagcctttgctattttgcacccagtcaataatcggctgtc

SEQ ID NO: 1072 - DNA, 55 bp, synthetic construct
  misc_feature 1..55: note = artificial DNA sequence
  source 1..55: mol_type = other DNA
agttttgttcatagttagcgtaatttaacgtcagatagctcaaacttaaatttct

SEQ ID NO: 1073 - DNA, 48 bp, synthetic construct
  misc_feature 1..48: note = artificial DNA sequence
  source 1..48: mol_type = other DNA
gtacataagtaaatcgtcgctattaattaatttttccttagaattacc

SEQ ID NO: 1074 - DNA, 40 bp, synthetic construct
  misc_feature 1..40: note = artificial DNA sequence
  source 1..40: mol_type = other DNA
tgaatcggagagagtttaaagcctgcgtggtggttccgaa

SEQ ID NO: 1075 - DNA, 43 bp, synthetic construct
  misc_feature 1..43: note = artificial DNA sequence
  source 1..43: mol_type = other DNA
tcagacgatgcattaaattcgtaaataaagtggcagcaagcgg

SEQ ID NO: 1076 - DNA, 40 bp, synthetic construct
  misc_feature 1..40: note = artificial DNA sequence
  source 1..40: mol_type = other DNA
ggaggtttattattcataattacaagtaccgcgtaccagg

SEQ ID NO: 1077 - DNA, 43 bp, synthetic construct
  misc_feature 1..43: note = artificial DNA sequence
  source 1..43: mol_type = other DNA
ctacatttttattttatcctgcgtcaaaattttttgaaaatag

SEQ ID NO: 1078 - DNA, 35 bp, synthetic construct
  misc_feature 1..35: note = artificial DNA sequence
  source 1..35: mol_type = other DNA
agattaagatttacgagcatgtatttttaaaccaa

SEQ ID NO: 1079 - DNA, 44 bp, synthetic construct
  misc_feature 1..44: note = artificial DNA sequence
  source 1..44: mol_type = other DNA
cgctgagatcatcttctgatttttctaaatttaatgttttttaa

SEQ ID NO: 1080 - DNA, 47 bp, synthetic construct
  misc_feature 1..47: note = artificial DNA sequence
  source 1..47: mol_type = other DNA
ctgcgcgcctgtgcacgctttccatgaaattgttatatggaaccgcc

SEQ ID NO: 1081 - DNA, 43 bp, synthetic construct
  misc_feature 1..43: note = artificial DNA sequence
  source 1..43: mol_type = other DNA
tcattccataaatcaagattagttacagagagcagttacaaaa

SEQ ID NO: 1082 - DNA, 48 bp, synthetic construct
  misc_feature 1..48: note = artificial DNA sequence
  source 1..48: mol_type = other DNA
cgtcagcgtggtgctggtctggaaggaagcaagcgcatcggataggtc

SEQ ID NO: 1083 - DNA, 38 bp, synthetic construct
  misc_feature 1..38: note = artificial DNA sequence
  source 1..38: mol_type = other DNA
ctgcgaacgagtagatgcgacctgtcaagagtaatctt

SEQ ID NO: 1084 - DNA, 35 bp, synthetic construct
  misc_feature 1..35: note = artificial DNA sequence
  source 1..35: mol_type = other DNA
gtttggattatacttttttctgaataattctggcc

SEQ ID NO: 1085 - DNA, 49 bp, synthetic construct
  misc_feature 1..49: note = artificial DNA sequence
  source 1..49: mol_type = other DNA
gacaagcgcttcgacaacaacagtttcaatatctggtcagtttagtttg

SEQ ID NO: 1086 - DNA, 32 bp, synthetic construct
  misc_feature 1..32: note = artificial DNA sequence
  source 1..32: mol_type = other DNA
tttggggcgtgtctggttttaaatattaccca

SEQ ID NO: 1087 - DNA, 39 bp, synthetic construct
  misc_feature 1..39: note = artificial DNA sequence
  source 1..39: mol_type = other DNA
gtactatggttttttgctttgacgcctccggccagacca

SEQ ID NO: 1088 - DNA, 47 bp, synthetic construct
  misc_feature 1..47: note = artificial DNA sequence
  source 1..47: mol_type = other DNA
gcgcaacagtgccacgctgagagcaccctcaagaaaggaattgagga

SEQ ID NO: 1089 - DNA, 40 bp, synthetic construct
  misc_feature 1..40: note = artificial DNA sequence
  source 1..40: mol_type = other DNA
tttcgcaccctgataagtacaacggagatttgcatccctt

SEQ ID NO: 1090 - DNA, 40 bp, synthetic construct
  misc_feature 1..40: note = artificial DNA sequence
  source 1..40: mol_type = other DNA
tgccatcccacgccccagcccgaggagtccactattaaag

SEQ ID NO: 1091 - DNA, 48 bp, synthetic construct
  misc_feature 1..48: note = artificial DNA sequence
  source 1..48: mol_type = other DNA
caaagcgatccttttgatcgtcataatcaacgtaacaaagggctggct

SEQ ID NO: 1092 - DNA, 50 bp, synthetic construct
  misc_feature 1..50: note = artificial DNA sequence
  source 1..50: mol_type = other DNA
tcagatgccgggttaccttttttcagccagcggtgccggtgccccctgca

SEQ ID NO: 1093 - DNA, 39 bp, synthetic construct
  misc_feature 1..39: note = artificial DNA sequence
  source 1..39: mol_type = other DNA
aaatattcattgtcagcagcaacggattagactcgtatt

SEQ ID NO: 1094 - DNA, 46 bp, synthetic construct
  misc_feature 1..46: note = artificial DNA sequence
  source 1..46: mol_type = other DNA
gtgttcagcaaatcgttaacggcagcgccagggttgcccttccccg

SEQ ID NO: 1095 - DNA, 42 bp, synthetic construct
  misc_feature 1..42: note = artificial DNA sequence
  source 1..42: mol_type = other DNA
ccacgctggtttgaaccagcttacggctggaggtggttgcgg

SEQ ID NO: 1096 - DNA, 40 bp, synthetic construct
  misc_feature 1..40: note = artificial DNA sequence
  source 1..40: mol_type = other DNA
acactggtctttgctcgtcataaaaggttatcgaagtatt

SEQ ID NO: 1097 - DNA, 42 bp, synthetic construct; identical to SEQ ID NO: 702
  misc_feature 1..42: note = artificial DNA sequence
  source 1..42: mol_type = other DNA

SEQ ID NO: 1098 - DNA, 47 bp, synthetic construct
  misc_feature 1..47: note = artificial DNA sequence
  source 1..47: mol_type = other DNA
cgcaagaagtcattgcaggaaccggatattcatgcaactgagtacct

SEQ ID NO: 1099 - DNA, 39 bp, synthetic construct
  misc_feature 1..39: note = artificial DNA sequence
  source 1..39: mol_type = other DNA
gaaacaaaattgtgtcgaaatcctggcaaataaagtacg

SEQ ID NO: 1100 - DNA, 43 bp, synthetic construct
  misc_feature 1..43: note = artificial DNA sequence
  source 1..43: mol_type = other DNA
gcagcacctgccggacttatcatcatattcacgtataacgtgc

SEQ ID NO: 1101 - DNA, 42 bp, synthetic construct
  misc_feature 1..42: note = artificial DNA sequence
  source 1..42: mol_type = other DNA
tgaacggtgtcggtcaatgcaaaagaatacactaaaacactc

SEQ ID NO: 1102 - DNA, 38 bp, synthetic construct
  misc_feature 1..38: note = artificial DNA sequence
  source 1..38: mol_type = other DNA
taaaaatatttgaatgcctaaaacaaatcctcaaacaa

SEQ ID NO: 1103 - DNA, 37 bp, synthetic construct
  misc_feature 1..37: note = artificial DNA sequence
  source 1..37: mol_type = other DNA
ccaacgcgcggggagagtttttcggtttgcgtattgg

SEQ ID NO: 1104 - DNA, 47 bp, synthetic construct
  misc_feature 1..47: note = artificial DNA sequence
  source 1..47: mol_type = other DNA
aaaacagatgaaaaggcaggcaagttaattgcaccagacctccccct

SEQ ID NO: 1105 - DNA, 48 bp, synthetic construct
  misc_feature 1..48: note = artificial DNA sequence
  source 1..48: mol_type = other DNA
tatcatcgtcaatccgccgggcgcgtccagcaacgttattgcggaaca

SEQ ID NO: 1106 - DNA, 40 bp, synthetic construct
  misc_feature 1..40: note = artificial DNA sequence
  source 1..40: mol_type = other DNA
agagggttttttgatataagtatatatatttttaaggcgt

SEQ ID NO: 1107 - DNA, 40 bp, synthetic construct
  misc_feature 1..40: note = artificial DNA sequence
  source 1..40: mol_type = other DNA
ttaaacagactgcggaataagagggctgtagctcaacatg

SEQ ID NO: 1108 - DNA, 40 bp, synthetic construct
  misc_feature 1..40: note = artificial DNA sequence
  source 1..40: mol_type = other DNA
ttatgagtagaagaacacaatattactttttgccagctca

SEQ ID NO: 1109 - DNA, 30 bp, synthetic construct
  misc_feature 1..30: note = artificial DNA sequence
  source 1..30: mol_type = other DNA
aacttttttatagacgtgagccgagctcga

SEQ ID NO: 1110 - DNA, 45 bp, synthetic construct
  misc_feature 1..45: note = artificial DNA sequence
  source 1..45: mol_type = other DNA
aaatctacgttaataaaacgataaattgggcttgagacgaaagag

SEQ ID NO: 1111 - DNA, 42 bp, synthetic construct
  misc_feature 1..42: note = artificial DNA sequence
  source 1..42: mol_type = other DNA
tattatctggtgccggaaattgccagatacataacgccaaaa

SEQ ID NO: 1112 - DNA, 40 bp, synthetic construct
  misc_feature 1..40: note = artificial DNA sequence
  source 1..40: mol_type = other DNA
ttagtgatgaagggtaaagttaaacgatgctgcgtctcgt

SEQ ID NO: 1113 - DNA, 30 bp, synthetic construct
  misc_feature 1..30: note = artificial DNA sequence
  source 1..30: mol_type = other DNA
aattttaaattatttatctaaagcacattg

SEQ ID NO: 1114 - DNA, 40 bp, synthetic construct
  misc_feature 1..40: note = artificial DNA sequence
  source 1..40: mol_type = other DNA
cagcagcaagactttattgcccgatcagcgggtgccaacg

SEQ ID NO: 1115 - DNA, 47 bp, synthetic construct
  misc_feature 1..47: note = artificial DNA sequence
  source 1..47: mol_type = other DNA
aatgaaaatgcgcgaactgatagcgctattagaagaaaccaccatca

SEQ ID NO: 1116 - DNA, 39 bp, synthetic construct
  misc_feature 1..39: note = artificial DNA sequence
  source 1..39: mol_type = other DNA
aggatttataaaatatccttgctgaacctcaaatatcaa

SEQ ID NO: 1117 - DNA, 48 bp, synthetic construct
  misc_feature 1..48: note = artificial DNA sequence
  source 1..48: mol_type = other DNA
aagtttcagaccttcactccatgtacccccagcgattataccaagcgc

SEQ ID NO: 1118 - DNA, 40 bp, synthetic construct
  misc_feature 1..40: note = artificial DNA sequence
  source 1..40: mol_type = other DNA
ttaacaccgcctgagcggtgaggcaccaccagcagaagat

SEQ ID NO: 1119 - DNA, 48 bp, synthetic construct
  misc_feature 1..48: note = artificial DNA sequence
  source 1..48: mol_type = other DNA
cgtctgtttttaatggaagtttgatacatttgtatgagccaaaggttt

SEQ ID NO: 1120 - DNA, 34 bp, synthetic construct
  misc_feature 1..34: note = artificial DNA sequence
  source 1..34: mol_type = other DNA
ggtacctcctcacatttttttgaggagcggctgg

SEQ ID NO: 1121 - DNA, 44 bp, synthetic construct
  misc_feature 1..44: note = artificial DNA sequence
  source 1..44: mol_type = other DNA
gaggccatttttcgagtaaatttatattttttcagtgtaacatt

SEQ ID NO: 1122 - DNA, 34 bp, synthetic construct
  misc_feature 1..34: note = artificial DNA sequence
  source 1..34: mol_type = other DNA
acagagatacattggcagtttttttcaccagtca

SEQ ID NO: 1123 - DNA, 39 bp, synthetic construct
  misc_feature 1..39: note = artificial DNA sequence
  source 1..39: mol_type = other DNA
ggcggcctccacatttttcccgcaaatcccgtaaaaaaa

SEQ ID NO: 1124 - DNA, 48 bp, synthetic construct
  misc_feature 1..48: note = artificial DNA sequence
  source 1..48: mol_type = other DNA
ttgtagaacgttttttattgccgttccggcaaatcggcctcaggaaga

SEQ ID NO: 1125 - DNA, 43 bp, synthetic construct
  misc_feature 1..43: note = artificial DNA sequence
  source 1..43: mol_type = other DNA
ccgcacaaacgtggactttttccaacgtcaaatcggcaaaatc

SEQ ID NO: 1126 - DNA, 40 bp, synthetic construct
  misc_feature 1..40: note = artificial DNA sequence
  source 1..40: mol_type = other DNA
gcacacagacaatattccgaacgaggtcagtaatcgccat

SEQ ID NO: 1127 - DNA, 52 bp, synthetic construct
  misc_feature 1..52: note = artificial DNA sequence
  source 1..52: mol_type = other DNA
tctttaaagaacccttctgacccctgatttgatggcaattcatcacgcggtc

SEQ ID NO: 1128 - DNA, 48 bp, synthetic construct
  misc_feature 1..48: note = artificial DNA sequence
  source 1..48: mol_type = other DNA
acaccagaggcgcatactgctcatgaacaacataggaataccacaaat

SEQ ID NO: 1129 - DNA, 42 bp, synthetic construct
  misc_feature 1..42: note = artificial DNA sequence
  source 1..42: mol_type = other DNA
tcatggtcaacatcacttgccgagccgtttttcaatagataa

SEQ ID NO: 1130 - DNA, 40 bp, synthetic construct
  misc_feature 1..40: note = artificial DNA sequence
  source 1..40: mol_type = other DNA
aggggacgacgacagtgtagatggactccaactaagaata

SEQ ID NO: 1131 - DNA, 39 bp, synthetic construct
  misc_feature 1..39: note = artificial DNA sequence
  source 1..39: mol_type = other DNA
gaataagtaactaaagcggccagtgccaagctttcagag

SEQ ID NO: 1132 - DNA, 46 bp, synthetic construct
  misc_feature 1..46: note = artificial DNA sequence
  source 1..46: mol_type = other DNA
tcatttttttttgcggatggcttcgcgttttttttaattcgagctt

SEQ ID NO: 1133 - DNA, 47 bp, synthetic construct
  misc_feature 1..47: note = artificial DNA sequence
  source 1..47: mol_type = other DNA
ccaacctaaaatggtttaatttttttcaactttaatcgttgggaaga

SEQ ID NO: 1134 - DNA, 37 bp, synthetic construct
  misc_feature 1..37: note = artificial DNA sequence
  source 1..37: mol_type = other DNA
aagaggaagcccgcgatcggtgcgggggtcaactgtt

SEQ ID NO: 1135 - DNA, 32 bp, synthetic construct
  misc_feature 1..32: note = artificial DNA sequence
  source 1..32: mol_type = other DNA
gctccaacggggaattaacaactttattttct

SEQ ID NO: 1136 - DNA, 39 bp, synthetic construct
  misc_feature 1..39: note = artificial DNA sequence
  source 1..39: mol_type = other DNA
ccgacttgaaggccggaaagaaactacaaatttttaaca

SEQ ID NO: 1137 - DNA, 32 bp, synthetic construct
  misc_feature 1..32: note = artificial DNA sequence
  source 1..32: mol_type = other DNA
gggaagggtaagttgggtaacgcctgtgctgc

SEQ ID NO: 1138 - DNA, 40 bp, synthetic construct
  misc_feature 1..40: note = artificial DNA sequence
  source 1..40: mol_type = other DNA
cagctttcatcaagacttcaaataccaataggtgaatttc

SEQ ID NO: 1139 - DNA, 40 bp, synthetic construct
  misc_feature 1..40: note = artificial DNA sequence
  source 1..40: mol_type = other DNA
gtaaatgacaacagtttcagcggagtgaggaacaccgtca

SEQ ID NO: 1140 - DNA, 49 bp, synthetic construct
  misc_feature 1..49: note = artificial DNA sequence
  source 1..49: mol_type = other DNA
cgtggaagaattagcaaaatttttttagcaataaagcattaacatccaa

SEQ ID NO: 1141 - DNA, 46 bp, synthetic construct
  misc_feature 1..46: note = artificial DNA sequence
  source 1..46: mol_type = other DNA
gcggattgtttttccgtaatggtaaccgtgcatgcatcaaaaagat

SEQ ID NO: 1142 - DNA, 48 bp, synthetic construct
  misc_feature 1..48: note = artificial DNA sequence
  source 1..48: mol_type = other DNA
aaatcatatggcatcaattttttttactaatattttttaaacaggaag

SEQ ID NO: 1143 - DNA, 48 bp, synthetic construct
  misc_feature 1..48: note = artificial DNA sequence
  source 1..48: mol_type = other DNA
caccattattgcattatgaccctgtattttaatcaaaaggttttagaa

SEQ ID NO: 1144 - DNA, 56 bp, synthetic construct
  misc_feature 1..56: note = artificial DNA sequence
  source 1..56: mol_type = other DNA
accagtagttgttaaagtgagaaaggccgccagtaaagatatgcaatgcctgagta

SEQ ID NO: 1145 - DNA, 46 bp, synthetic construct
  misc_feature 1..46: note = artificial DNA sequence
  source 1..46: mol_type = other DNA
gaggcaggtcagacaccaccagtttgccttttttcggtccggaatc

SEQ ID NO: 1146 - DNA, 38 bp, synthetic construct
  misc_feature 1..38: note = artificial DNA sequence
  source 1..38: mol_type = other DNA
gcataaagccgtgggagcgagtaacaacccgtattttt

SEQ ID NO: 1147 - DNA, 40 bp, synthetic construct
  misc_feature 1..40: note = artificial DNA sequence
  source 1..40: mol_type = other DNA
ttaaatttataaccgacggtttatcagcttgctggcgaaa

SEQ ID NO: 1148 - DNA, 40 bp, synthetic construct
  misc_feature 1..40: note = artificial DNA sequence
  source 1..40: mol_type = other DNA
ttatataattgaggactaaagactaacggctacagaggct

SEQ ID NO: 1149 - DNA, 49 bp, synthetic construct
  misc_feature 1..49: note = artificial DNA sequence
  source 1..49: mol_type = other DNA
tttttaagtcacaatcaacatataaaacgtcagaatcaagagccgccgc

SEQ ID NO: 1150 - DNA, 44 bp, synthetic construct
  misc_feature 1..44: note = artificial DNA sequence
  source 1..44: mol_type = other DNA
tcctgaactaaataagtataaagctagcgacaccaatgaaacca

SEQ ID NO: 1151 - DNA, 48 bp, synthetic construct
  misc_feature 1..48: note = artificial DNA sequence
  source 1..48: mol_type = other DNA
acgattttttgtttaaaatcttaccaacgagttaatatcccatcctaa

SEQ ID NO: 1152 - DNA, 42 bp, synthetic construct
  misc_feature 1..42: note = artificial DNA sequence
  source 1..42: mol_type = other DNA
ttccatataacaggttgatattttttcagaaaagccccaaaa

SEQ ID NO: 1153 - DNA, 39 bp, synthetic construct
  misc_feature 1..39: note = artificial DNA sequence
  source 1..39: mol_type = other DNA
ataagaatatcttaccgaagcccgtggagccattgaggg

SEQ ID NO: 1154 - DNA, 33 bp, synthetic construct
  misc_feature 1..33: note = artificial DNA sequence
  source 1..33: mol_type = other DNA
aagaaaaaagggcttaattgagaaggtatccaa

SEQ ID NO: 1155 - DNA, 45 bp, synthetic construct
  misc_feature 1..45: note = artificial DNA sequence
  source 1..45: mol_type = other DNA
ttctagctgataacctgtttttttagctatattttcaaccattag

SEQ ID NO: 1156 - DNA, 40 bp, synthetic construct
  misc_feature 1..40: note = artificial DNA sequence
  source 1..40: mol_type = other DNA
tttgctaagagccagcgttgtaccaaaaaatattcacaaa

SEQ ID NO: 1157 - DNA, 48 bp, synthetic construct
  misc_feature 1..48: note = artificial DNA sequence
  source 1..48: mol_type = other DNA
tcaggtcacgcgttttccggagacagtcaaatcaccatcatttttgag

SEQ ID NO: 1158 - DNA, 39 bp, synthetic construct
  misc_feature 1..39: note = artificial DNA sequence
  source 1..39: mol_type = other DNA
gagtctggagcaaacctatatgtcagggagttaaaggcc

SEQ ID NO: 1159 - DNA, 40 bp, synthetic construct
  misc_feature 1..40: note = artificial DNA sequence
  source 1..40: mol_type = other DNA
aatgacaacaaccatcgcttttgcattgtatacgatgaac

SEQ ID NO: 1160 - DNA, 49 bp, synthetic construct
  misc_feature 1..49: note = artificial DNA sequence
  source 1..49: mol_type = other DNA
ttattactttttaggtagtcaggacattgtgaattaccttaacgggtaa

SEQ ID NO: 1161 - DNA, 38 bp, synthetic construct
  misc_feature 1..38: note = artificial DNA sequence
  source 1..38: mol_type = other DNA
gcccacgcttgttaaacaaaaatagaagcctcctcaga

SEQ ID NO: 1162 - DNA, 47 bp, synthetic construct
  misc_feature 1..47: note = artificial DNA sequence
  source 1..47: mol_type = other DNA
caacgctcattatttatcccaggcaatagaaaattcatatggtttac

SEQ ID NO: 1163 - DNA, 37 bp, synthetic construct
  misc_feature 1..37: note = artificial DNA sequence
  source 1..37: mol_type = other DNA
aaaccttcctgtagcggggaaaatctccaaaaaaaag

SEQ ID NO: 1164 - DNA, 41 bp, synthetic construct
  misc_feature 1..41: note = artificial DNA sequence
  source 1..41: mol_type = other DNA
agcgccattcgccattcaaaatagcgagaggctgaggcata

SEQ ID NO: 1165 - DNA, 31 bp, synthetic construct
  misc_feature 1..31: note = artificial DNA sequence
  source 1..31: mol_type = other DNA
gccttagcgtttgccaccaccaccggaaccg

SEQ ID NO: 1166 - DNA, 24 bp, synthetic construct
  misc_feature 1..24: note = artificial DNA sequence
  source 1..24: mol_type = other DNA
ccctcatataatacttataaaaat

SEQ ID NO: 1167 - DNA, 44 bp, synthetic construct
  misc_feature 1..44: note = artificial DNA sequence
  source 1..44: mol_type = other DNA
caccctcagcagcgaacgatagttaattgctttttgaatataat

SEQ ID NO: 1168 - DNA, 40 bp, synthetic construct
  misc_feature 1..40: note = artificial DNA sequence
  source 1..40: mol_type = other DNA
atgtgtagccagaaccgattggccccattagcagccattt

SEQ ID NO: 1169 - DNA, 48 bp, synthetic construct
  misc_feature 1..48: note = artificial DNA sequence
  source 1..48: mol_type = other DNA
agcctgctttaatattttgcctgaagatctacaaaggctaatcaccgg

SEQ ID NO: 1170 - DNA, 34 bp, synthetic construct
  misc_feature 1..34: note = artificial DNA sequence
  source 1..34: mol_type = other DNA
aataaacacatagcccccttacggaataggtgta

SEQ ID NO: 1171 - DNA, 48 bp, synthetic construct
  misc_feature 1..48: note = artificial DNA sequence
  source 1..48: mol_type = other DNA
ccgaccgtgtgataaaagttaattagagtcaatagtgaatttatcaaa

SEQ ID NO: 1172 - DNA, 48 bp, synthetic construct
  misc_feature 1..48: note = artificial DNA sequence
  source 1..48: mol_type = other DNA
aagagaatagcaaatattcaaccgttatttcaacgcaaggttgcggga

SEQ ID NO: 1173 - DNA, 47 bp, synthetic construct
  misc_feature 1..47: note = artificial DNA sequence
  source 1..47: mol_type = other DNA
agaacgcggtctgagagactacctttttaacctaccgacatagaaaa

SEQ ID NO: 1174 - DNA, 46 bp, synthetic construct
  misc_feature 1..46: note = artificial DNA sequence
  source 1..46: mol_type = other DNA
cgctattacgccagctttcgaggaacgccattcagctcagtagtag

SEQ ID NO: 1175 - DNA, 46 bp, synthetic construct
  misc_feature 1..46: note = artificial DNA sequence
  source 1..46: mol_type = other DNA
ttcagaaaacgagaatgtttttccataacatcagttgtttttgatt

SEQ ID NO: 1176 - DNA, 39 bp, synthetic construct; identical to SEQ ID NO: 775
  misc_feature 1..39: note = artificial DNA sequence
  source 1..39: mol_type = other DNA

SEQ ID NO: 1177 - DNA, 44 bp, synthetic construct
  misc_feature 1..44: note = artificial DNA sequence
  source 1..44: mol_type = other DNA
cataatttttggaaccgaacaatacgtaatgccactacgaaggc

SEQ ID NO: 1178 - DNA, 48 bp, synthetic construct
  misc_feature 1..48: note = artificial DNA sequence
  source 1..48: mol_type = other DNA
tgaccaacagacagcagcatgtcaatcatttttatgtaccggcgcaga

SEQ ID NO: 1179 - DNA, 39 bp, synthetic construct
  misc_feature 1..39: note = artificial DNA sequence
  source 1..39: mol_type = other DNA
gtaagagcttataccagaaagatttttgaaagaggacag

SEQ ID NO: 1180 - DNA, 38 bp, synthetic construct
  misc_feature 1..38: note = artificial DNA sequence
  source 1..38: mol_type = other DNA
caaatggtcaataaggtaatcgtaaaactatcggaacg

SEQ ID NO: 1181 - DNA, 34 bp, synthetic construct
  misc_feature 1..34: note = artificial DNA sequence
  source 1..34: mol_type = other DNA
gaattactttgctttttaaaagaagttccaggca

SEQ ID NO: 1182 - DNA, 38 bp, synthetic construct
  misc_feature 1..38: note = artificial DNA sequence
  source 1..38: mol_type = other DNA
attcgcagtaaacggaggcttgaaatgctgaggttggg

SEQ ID NO: 1183 - DNA, 48 bp, synthetic construct
  misc_feature 1..48: note = artificial DNA sequence
  source 1..48: mol_type = other DNA
gccaccacaaccagagtcttttcataatcaaacaagacaaataattac

SEQ ID NO: 1184 - DNA, 40 bp, synthetic construct
  misc_feature 1..40: note = artificial DNA sequence
  source 1..40: mol_type = other DNA
cctcagagcatcggcatagcgtcaatgcgttagcaaagac

SEQ ID NO: 1185 - DNA, 52 bp, synthetic construct
  misc_feature 1..52: note = artificial DNA sequence
  source 1..52: mol_type = other DNA
agagcctaattcgcgcagaggcgatgaagcctagaacgggagcaagccaggt

SEQ ID NO: 1186 - DNA, 44 bp, synthetic construct
  misc_feature 1..44: note = artificial DNA sequence
  source 1..44: mol_type = other DNA
tcatgtttttattttcatcgcgagaacatattaaacttgcttct

SEQ ID NO: 1187 - DNA, 51 bp, synthetic construct
  misc_feature 1..51: note = artificial DNA sequence
  source 1..51: mol_type = other DNA
actacaagatgaatatacagtaagagggtaaaactgaaccgaggtgctcgt

SEQ ID NO: 1188 - DNA, 39 bp, synthetic construct
  misc_feature 1..39: note = artificial DNA sequence
  source 1..39: mol_type = other DNA
tccccgtaaagcactaaatctttggagcaaatcagggct

SEQ ID NO: 1189 - DNA, 40 bp, synthetic construct
  misc_feature 1..40: note = artificial DNA sequence
  source 1..40: mol_type = other DNA
tttgatatagaaggcttcactgccctctgtggtggtcata

SEQ ID NO: 1190 - DNA, 44 bp, synthetic construct
  misc_feature 1..44: note = artificial DNA sequence
  source 1..44: mol_type = other DNA
tttgcccccgattcaagtttggaacccttgaaccatgccgccag

SEQ ID NO: 1191 - DNA, 51 bp, synthetic construct
  misc_feature 1..51: note = artificial DNA sequence
  source 1..51: mol_type = other DNA
gcaaattaccacacaaggaagaaattagagctcactacgaaagggagttct

SEQ ID NO: 1192 - DNA, 56 bp, synthetic construct
  misc_feature 1..56: note = artificial DNA sequence
  source 1..56: mol_type = other DNA
tacgagaaatctttgtacttagccggaacgaccgttgattcccaattatacatttc

SEQ ID NO: 1193 - DNA, 40 bp, synthetic construct
  misc_feature 1..40: note = artificial DNA sequence
  source 1..40: mol_type = other DNA
acagaccaacgagtagactaacgtcagtgaataaggcttt

SEQ ID NO: 1194 - DNA, 53 bp, synthetic construct
  misc_feature 1..53: note = artificial DNA sequence
  source 1..53: mol_type = other DNA
tggatagcgtccttcaactaatgcagagggggtaatagtaccgcttagtcaga

SEQ ID NO: 1195 - DNA, 41 bp, synthetic construct
  misc_feature 1..41: note = artificial DNA sequence
  source 1..41: mol_type = other DNA
ccagtttgtcgcactccagccagctttccggcaaaatgttt

SEQ ID NO: 1196 - DNA, 43 bp, synthetic construct
  misc_feature 1..43: note = artificial DNA sequence
  source 1..43: mol_type = other DNA
ctttaggagcactaactaatgggtgggtcactgtggtttttct

SEQ ID NO: 1197 - DNA, 35 bp, synthetic construct
  misc_feature 1..35: note = artificial DNA sequence
  source 1..35: mol_type = other DNA
tccagtgagacgggcaacaaaaagaatcagcaggc

SEQ ID NO: 1198 - DNA, 44 bp, synthetic construct
  misc_feature 1..44: note = artificial DNA sequence
  source 1..44: mol_type = other DNA
tgcgcgtaagcacatcctcatatggaacaaatagggttgagtgt

SEQ ID NO: 1199 - DNA, 30 bp, synthetic construct
  misc_feature 1..30: note = artificial DNA sequence
  source 1..30: mol_type = other DNA
tcagttacggaacggtcggtggatcatttt

SEQ ID NO: 1200 - DNA, 49 bp, synthetic construct
  misc_feature 1..49: note = artificial DNA sequence
  source 1..49: mol_type = other DNA
gggatcgtagggtagcttttcatgaggaagtttccattaatgcgatttt

SEQ ID NO: 1201 - DNA, 42 bp, synthetic construct
  misc_feature 1..42: note = artificial DNA sequence
  source 1..42: mol_type = other DNA
tctggctcaaacactatcttgatacatcaaaaatcacctctt

SEQ ID NO: 1202 - DNA, 35 bp, synthetic construct
  misc_feature 1..35: note = artificial DNA sequence
  source 1..35: mol_type = other DNA
tagagcttgcgccgacttaaacagcataaccctct

SEQ ID NO: 1203 - DNA, 38 bp, synthetic construct
  misc_feature 1..38: note = artificial DNA sequence
  source 1..38: mol_type = other DNA
tcagacgacgataaaaaccaggctgcgctttaccctga

SEQ ID NO: 1204 - DNA, 42 bp, synthetic construct
  misc_feature 1..42: note = artificial DNA sequence
  source 1..42: mol_type = other DNA
ttaataagagaatataaagtccggcttatgcaaatccaatcg

SEQ ID NO: 1205 - DNA, 42 bp, synthetic construct
  misc_feature 1..42: note = artificial DNA sequence
  source 1..42: mol_type = other DNA
attcgcgtctggatcaattgtattatattcgggcattttcgt

SEQ ID NO: 1206 - DNA, 40 bp, synthetic construct
  misc_feature 1..40: note = artificial DNA sequence
  source 1..40: mol_type = other DNA
tacgcagtataggcagagtcgtttagtatcatgactgtag

SEQ ID NO: 1207 - DNA, 43 bp, synthetic construct
  misc_feature 1..43: note = artificial DNA sequence
  source 1..43: mol_type = other DNA
tcacgttggaagggttttcccagtcacgacgttgtaagactct

SEQ ID NO: 1208 - DNA, 40 bp, synthetic construct
  misc_feature 1..40: note = artificial DNA sequence
  source 1..40: mol_type = other DNA
tcaacaagctaatgcagaacgcgaaaggtaaagtaaaatt

SEQ ID NO: 1209 - DNA, 42 bp, synthetic construct
  misc_feature 1..42: note = artificial DNA sequence
  source 1..42: mol_type = other DNA
ttgtccagacgatgtaatttgttagcaaccaaaggagccttt

SEQ ID NO: 1210 - DNA, 33 bp, synthetic construct
  misc_feature 1..33: note = artificial DNA sequence
  source 1..33: mol_type = other DNA
cctgtttaacgccaacacgacaataggaaacct

SEQ ID NO: 1211 - DNA, 38 bp, synthetic construct
  misc_feature 1..38: note = artificial DNA sequence
  source 1..38: mol_type = other DNA
ttacgaaggcatgattaaaacgagaattgcgaataata

SEQ ID NO: 1212 - DNA, 38 bp, synthetic construct
  misc_feature 1..38: note = artificial DNA sequence
  source 1..38: mol_type = other DNA
tacatcatagataagatcatagagaaaactttttcaaa

SEQ ID NO: 1213 - DNA, 32 bp, synthetic construct
  misc_feature 1..32: note = artificial DNA sequence
  source 1..32: mol_type = other DNA
atacccaaaaatacattaccagaaaacaacat

SEQ ID NO: 1214 - DNA, 35 bp, synthetic construct
  misc_feature 1..35: note = artificial DNA sequence
  source 1..35: mol_type = other DNA
tccgaacaaagtacataaatcgccatacttaccag

SEQ ID NO: 1215 - DNA, 48 bp, synthetic construct
  misc_feature 1..48: note = artificial DNA sequence
  source 1..48: mol_type = other DNA
aacgtagaaagaactacgcaataataacggaaaaagtaagcagaaact

SEQ ID NO: 1216 - DNA, 58 bp, synthetic construct
  misc_feature 1..58: note = artificial DNA sequence
  source 1..58: mol_type = other DNA
gcagtagagtaggtagagattaggcactaccatacgatctaaagcgcagtaagtacaa

SEQ ID NO: 1217 - DNA, 58 bp, synthetic construct
  misc_feature 1..58: note = artificial DNA sequence
  source 1..58: mol_type = other DNA
gcagtagagtaggtagagattaggcaaaaaagaggaaccacagacagccccgtctttc

SEQ ID NO: 1218 - DNA, 50 bp, synthetic construct
  misc_feature 1..50: note = artificial DNA sequence
  source 1..50: mol_type = other DNA
gcagtagagtaggtagagattaggcaatgcgccgctacaatacgctaggg

SEQ ID NO: 1219 - DNA, 65 bp, synthetic construct
  misc_feature 1..65: note = artificial DNA sequence
  source 1..65: mol_type = other DNA
gcagtagagtaggtagagattaggcaacgttggtaatataattgaaagcgagggaaggagcggaa

SEQ ID NO: 1220 - DNA, 50 bp, synthetic construct
  misc_feature 1..50: note = artificial DNA sequence
  source 1..50: mol_type = other DNA
gcagtagagtaggtagagattaggcacgctggcagagcctgattatcaga

SEQ ID NO: 1221 - DNA, 50 bp, synthetic construct
  misc_feature 1..50: note = artificial DNA sequence
  source 1..50: mol_type = other DNA
gcagtagagtaggtagagattaggcaagcaaagcggattctgcaaatgct

SEQ ID NO: 1222 - DNA, 50 bp, synthetic construct
  misc_feature 1..50: note = artificial DNA sequence
  source 1..50: mol_type = other DNA
gcagtagagtaggtagagattaggcatatgggatcggattctctaaatcg

SEQ ID NO: 1223 - DNA, 56 bp, synthetic construct
  misc_feature 1..56: note = artificial DNA sequence
  source 1..56: mol_type = other DNA
gcagtagagtaggtagagattaggcaaaggcgataaacattaaatgtgaacaaacg

SEQ ID NO: 1224 - DNA, 50 bp, synthetic construct
  misc_feature 1..50: note = artificial DNA sequence
  source 1..50: mol_type = other DNA
gcagtagagtaggtagagattaggcaaggaatagaaaggaacttattttg

SEQ ID NO: 1225 - DNA, 39 bp, synthetic construct
  misc_feature 1..39: note = artificial DNA sequence
  source 1..39: mol_type = other DNA
gtgaataaccttgcttctgtaaatcgtttttcgctatta

SEQ ID NO: 1226 - DNA, 40 bp, synthetic construct
  misc_feature 1..40: note = artificial DNA sequence
  source 1..40: mol_type = other DNA
ccgggggtaggcggattgtttttattgttctgaaacatga

SEQ ID NO: 1227 - DNA, 40 bp, synthetic construct
  misc_feature 1..40: note = artificial DNA sequence
  source 1..40: mol_type = other DNA
atattattgaggcgttttagcgaatagataagtcctgaac

SEQ ID NO: 1228 - DNA, 40 bp, synthetic construct
  misc_feature 1..40: note = artificial DNA sequence
  source 1..40: mol_type = other DNA
aacgggtaaaatcagattaacgtcaacagtacggtgaagg

SEQ ID NO: 1229 - DNA, 40 bp, synthetic construct
  misc_feature 1..40: note = artificial DNA sequence
  source 1..40: mol_type = other DNA
tatagaagtgattgctgagcaaaacagagccagcccggaa

SEQ ID NO: 1230 - DNA, 39 bp, synthetic construct
  misc_feature 1..39: note = artificial DNA sequence
  source 1..39: mol_type = other DNA
gagcaggtttaacgtacgtataataggaacctcggaacc

SEQ ID NO: 1231 - DNA, 40 bp, synthetic construct; identical to SEQ ID NO: 855
  misc_feature 1..40: note = artificial DNA sequence
  source 1..40: mol_type = other DNA

SEQ ID NO: 1232 - DNA, 40 bp, synthetic construct
  misc_feature 1..40: note = artificial DNA sequence
  source 1..40: mol_type = other DNA
aatagcaatagctatttttcttaccgaagccctttttaag

SEQ ID NO: 1233 - DNA, 39 bp, synthetic construct
  misc_feature 1..39: note = artificial DNA sequence
  source 1..39: mol_type = other DNA
ccgatttagaacctaccagttgggcggttgtgtacatcg

SEQ ID NO: 1234 - DNA, 39 bp, synthetic construct
  misc_feature 1..39: note = artificial DNA sequence
  source 1..39: mol_type = other DNA
cgatggcctttggggtcgaggtgggggtgccccggaagc

SEQ ID NO: 1235 - DNA, 40 bp, synthetic construct
  misc_feature 1..40: note = artificial DNA sequence
  source 1..40: mol_type = other DNA
ccaccctctaggtgtatcaccgtaattaattatgaaacaa

SEQ ID NO: 1236 - DNA, 56 bp, synthetic construct
  misc_feature 1..56: note = artificial DNA sequence
  source 1..56: mol_type = other DNA
caagttactatacagtaaaaatgaaaacacaagaattgagacagcggatctcacgg

SEQ ID NO: 1237 - DNA, 39 bp, synthetic construct
  misc_feature 1..39: note = artificial DNA sequence
  source 1..39: mol_type = other DNA
aagtattaattagcggtcgagagggttgataggcgggcc

SEQ ID NO: 1238 - DNA, 39 bp, synthetic construct
  misc_feature 1..39: note = artificial DNA sequence
  source 1..39: mol_type = other DNA
tagaagaactcaaacctttgattaaattaaccgttgtag

SEQ ID NO: 1239 - DNA, 41 bp, synthetic construct
  misc_feature 1..41: note = artificial DNA sequence
  source 1..41: mol_type = other DNA
gagctcgatgaatcggagagagtttaaagcctccgtggtgg

SEQ ID NO: 1240 - DNA, 39 bp, synthetic construct
  misc_feature 1..39: note = artificial DNA sequence
  source 1..39: mol_type = other DNA
aattgcgtgcaccgctcacaattctgagaagcgtgcttt

SEQ ID NO: 1241 - DNA, 40 bp, synthetic construct
  misc_feature 1..40: note = artificial DNA sequence
  source 1..40: mol_type = other DNA
tattactggtaatatcatacctaccctcgttaagggcgcg

SEQ ID NO: 1242 - DNA, 39 bp, synthetic construct
  misc_feature 1..39: note = artificial DNA sequence
  source 1..39: mol_type = other DNA
ttccgaaagggcgaaaaaccgtcacataaaaaaggagcg

SEQ ID NO: 1243 - DNA, 38 bp, synthetic construct; identical to SEQ ID NO: 671
  misc_feature 1..38: note = artificial DNA sequence
  source 1..38: mol_type = other DNA

SEQ ID NO: 1244 - DNA, 38 bp, synthetic construct
  misc_feature 1..38: note = artificial DNA sequence
  source 1..38: mol_type = other DNA
tttagcacaacgcctcgggagaaacaaccctccaaata

SEQ ID NO: 1245 - DNA, 42 bp, synthetic construct; identical to SEQ ID NO: 1039
  misc_feature 1..42: note = artificial DNA sequence
  source 1..42: mol_type = other DNA

SEQ ID NO: 1246 - DNA, 43 bp, synthetic construct
  misc_feature 1..43: note = artificial DNA sequence
  source 1..43: mol_type = other DNA
atcctgaatcatattaaatcaagtttttttagttaatatattt

SEQ ID NO: 1247 - DNA, 43 bp, synthetic construct; identical to SEQ ID NO: 662
  misc_feature 1..43: note = artificial DNA sequence
  source 1..43: mol_type = other DNA

SEQ ID NO: 1248 - DNA, 43 bp, synthetic construct
  misc_feature 1..43: note = artificial DNA sequence
  source 1..43: mol_type = other DNA
taatatccggtattctaagaacgctatcccaaagctacaattt

SEQ ID NO: 1249 - DNA, 43 bp, synthetic construct; identical to SEQ ID NO: 1075
  misc_feature 1..43: note = artificial DNA sequence
  source 1..43: mol_type = other DNA

SEQ ID NO: 1250 - DNA, 43 bp, synthetic construct
  misc_feature 1..43: note = artificial DNA sequence
  source 1..43: mol_type = other DNA
cctcctttttcgacttgcggggttacaaattttttaaacagcc

SEQ ID NO: 1251 - DNA, 55 bp, synthetic construct
  misc_feature 1..55: note = artificial DNA sequence
  source 1..55: mol_type = other DNA
gctcatttagagagaatgcgtagattttccctactatggcttctgaaataatcct

SEQ ID NO: 1252 - DNA, 47 bp, synthetic construct
  misc_feature 1..47: note = artificial DNA sequence
  source 1..47: mol_type = other DNA
ctgcgcgcctgtgcacgctttccatgaaattgttatgagaagcccaa

SEQ ID NO: 1253 - DNA, 47 bp, synthetic construct
  misc_feature 1..47: note = artificial DNA sequence
  source 1..47: mol_type = other DNA
taacagtgcccgtataggtcagtgcagccctcatagagccagatgaa

SEQ ID NO: 1254 - DNA, 40 bp, synthetic construct
  misc_feature 1..40: note = artificial DNA sequence
  source 1..40: mol_type = other DNA
agcgccatgtttaccaacgcagaattaagcccttctccgt

SEQ ID NO: 1255 - DNA, 44 bp, synthetic construct
  misc_feature 1..44: note = artificial DNA sequence
  source 1..44: mol_type = other DNA
cccttagaaaagaacgcgatttttaaaactttttcaaaaacaaa

SEQ ID NO: 1256 - DNA, 40 bp, synthetic construct
  misc_feature 1..40: note = artificial DNA sequence
  source 1..40: mol_type = other DNA
aatttcatttgaattataagtataccaccctcagactcct

SEQ ID NO: 1257 - DNA, 54 bp, synthetic construct
  misc_feature 1..54: note = artificial DNA sequence
  source 1..54: mol_type = other DNA
gggatttgttagtaaatgaatttgcacgtaaaacaagctcaaacttaaatttct

SEQ ID NO: 1258 - DNA, 35 bp, synthetic construct
  misc_feature 1..35: note = artificial DNA sequence
  source 1..35: mol_type = other DNA
attaattttgaacgcgcctgtttttttttcaacaa

SEQ ID NO: 1259 - DNA, 44 bp, synthetic construct
  misc_feature 1..44: note = artificial DNA sequence
  source 1..44: mol_type = other DNA
cgcgcttaatgcgccgctacgaatcagaatcggaaccatacgag

SEQ ID NO: 1260 - DNA, 34 bp, synthetic construct
  misc_feature 1..34: note = artificial DNA sequence
  source 1..34: mol_type = other DNA
gtcacctttttacttgaggtcccggaatttgtga

SEQ ID NO: 1261 - DNA, 47 bp, synthetic construct; identical to SEQ ID NO: 667
  misc_feature 1..47: note = artificial DNA sequence
  source 1..47: mol_type = other DNA

SEQ ID NO: 1262 - DNA, 31 bp, synthetic construct; identical to SEQ ID NO: 679
  misc_feature 1..31: note = artificial DNA sequence
  source 1..31: mol_type = other DNA

SEQ ID NO: 1263 - DNA, 48 bp, synthetic construct; identical to SEQ ID NO: 1045
  misc_feature 1..48: note = artificial DNA sequence
  source 1..48: mol_type = other DNA

SEQ ID NO: 1264 - DNA, 48 bp, synthetic construct
  misc_feature 1..48: note = artificial DNA sequence
  source 1..48: mol_type = other DNA
ttcatttcaatcattaccgcggctttattttcatcgtaggaaccaatc

SEQ ID NO: 1265 - DNA, 45 bp, synthetic construct; identical to SEQ ID NO: 1068
  misc_feature 1..45: note = artificial DNA sequence
  source 1..45: mol_type = other DNA

SEQ ID NO: 1266 - DNA, 46 bp, synthetic construct
  misc_feature 1..46: note = artificial DNA sequence
  source 1..46: mol_type = other DNA
aattacctttgaatactgagtttctccacagaccttgagcaaataa

SEQ ID NO: 1267 - DNA, 46 bp, synthetic construct
  misc_feature 1..46: note = artificial DNA sequence
  source 1..46: mol_type = other DNA
attactggtaataagttttaacggaacagttacatgtacggatagc

SEQ ID NO: 1268 - DNA, 47 bp, synthetic construct
  misc_feature 1..47: note = artificial DNA sequence
  source 1..47: mol_type = other DNA
gagcaagaaacaatgaaaacgtaccggaaatttttttattcattaaa

SEQ ID NO: 1269 - DNA, 49 bp, synthetic construct
  misc_feature 1..49: note = artificial DNA sequence
  source 1..49: mol_type = other DNA
gatacaggagtgtttgacgctcaatcatcaattaatggaagggtggcaa

SEQ ID NO: 1270 - DNA, 31 bp, synthetic construct
  misc_feature 1..31: note = artificial DNA sequence
  source 1..31: mol_type = other DNA
catatcaaaattattggattatattgctttg

SEQ ID NO: 1271 - DNA, 31 bp, synthetic construct
  misc_feature 1..31: note = artificial DNA sequence
  source 1..31: mol_type = other DNA
gtaacgagatgaaataaagaaattaacataa

SEQ ID NO: 1272 - DNA, 48 bp, synthetic construct
  misc_feature 1..48: note = artificial DNA sequence
  source 1..48: mol_type = other DNA
gcgaattagttttcacgctgcggccagaatgcccttttttcatgtaga

SEQ ID NO: 1273 - DNA, 48 bp, synthetic construct
  misc_feature 1..48: note = artificial DNA sequence
  source 1..48: mol_type = other DNA
aagtgccgggttttgctcagtacccaatactttatcggcctaatcagt

SEQ ID NO: 1274 - DNA, 48 bp, synthetic construct
  misc_feature 1..48: note = artificial DNA sequence
  source 1..48: mol_type = other DNA
cttttacatgtagcatgtcaccagtacaaactgccaccctgaagatga

SEQ ID NO: 1275 - DNA, 48 bp, synthetic construct
  misc_feature 1..48: note = artificial DNA sequence
  source 1..48: mol_type = other DNA
cagaacaaacggtacggaggccacatagctgtgcacgcgtcagtgtca

SEQ ID NO: 1276 - DNA, 48 bp, synthetic construct
  misc_feature 1..48: note = artificial DNA sequence
  source 1..48: mol_type = other DNA
aaggtaaatattgagagatagactaataataaagaaacgattttttgt

SEQ ID NO: 1277 - DNA, 48 bp, synthetic construct
  misc_feature 1..48: note = artificial DNA sequence
  source 1..48: mol_type = other DNA
catttaaccagtacataaatcaatatatgtgaaagaaaaaacatcaag

SEQ ID NO: 1278 - DNA, 34 bp, synthetic construct; identical to SEQ ID NO: 917
  misc_feature 1..34: note = artificial DNA sequence
  source 1..34: mol_type = other DNA

SEQ ID NO: 1279 - DNA, 40 bp, synthetic construct
  misc_feature 1..40: note = artificial DNA sequence
  source 1..40: mol_type = other DNA
gcagcaaaggtcagtaagagccgttattagactcagcggg

SEQ ID NO: 1280 - DNA, 30 bp, synthetic construct
  misc_feature 1..30: note = artificial DNA sequence
  source 1..30: mol_type = other DNA
caattcgaccattgcgcctgcaacacctga

SEQ ID NO: 1281 - DNA, 54 bp, synthetic construct
  misc_feature 1..54: note = artificial DNA sequence
  source 1..54: mol_type = other DNA
aaagaggattgacaaggattttaacgccaaagtaaattgtagactgagacgacg

SEQ ID NO: 1282 - DNA, 47 bp, synthetic construct
  misc_feature 1..47: note = artificial DNA sequence
  source 1..47: mol_type = other DNA
acatcgccgcaaagaataccaaaatgctgtagagaggtcaaaaagaa

SEQ ID NO: 1283 - DNA, 40 bp, synthetic construct
  misc_feature 1..40: note = artificial DNA sequence
  source 1..40: mol_type = other DNA
tttcgcacagccggaatccgcgacctgctccacatccctt

SEQ ID NO: 1284 - DNA, 52 bp, synthetic construct
  misc_feature 1..52: note = artificial DNA sequence
  source 1..52: mol_type = other DNA
gaaccctttacattggcagattcatattcaccagaaggagcggaacgcggtc

SEQ ID NO: 1285 - DNA, 51 bp, synthetic construct
  misc_feature 1..51: note = artificial DNA sequence
  source 1..51: mol_type = other DNA
acataaaagggacattaatgcgcgtaccgaacgtggcacagacaatatttt

SEQ ID NO: 1286 - DNA, 50 bp, synthetic construct; identical to SEQ ID NO: 1092
  misc_feature 1..50: note = artificial DNA sequence
  source 1..50: mol_type = other DNA

SEQ ID NO: 1287 - DNA, 50 bp, synthetic construct
  misc_feature 1..50: note = artificial DNA sequence
  source 1..50: mol_type = other DNA
tgccaacggcagcacctgccggactatcattttgcgaaccaccacacccg

SEQ ID NO: 1288 - DNA, 32 bp, synthetic construct
  misc_feature 1..32: note = artificial DNA sequence
  source 1..32: mol_type = other DNA
atcatacagaccattatctgcgaagcttgccc

SEQ ID NO: 1289 - DNA, 39 bp, synthetic construct
  misc_feature 1..39: note = artificial DNA sequence
  source 1..39: mol_type = other DNA
tgtcgaaacgaggcgcagacggtctgaaccttttagttt

SEQ ID NO: 1290 - DNA, 39 bp, synthetic construct
  misc_feature 1..39: note = artificial DNA sequence
  source 1..39: mol_type = other DNA
gtgtagcggtttttcacgctgcggcctccggccagaggg

SEQ ID NO: 1291 - DNA, 49 bp, synthetic construct
  misc_feature 1..49: note = artificial DNA sequence
  source 1..49: mol_type = other DNA
tgaatggctattagtctttctggccaaaagaatacttagaagcaataga

SEQ ID NO: 1292 - DNA, 49 bp, synthetic construct
  misc_feature 1..49: note = artificial DNA sequence
  source 1..49: mol_type = other DNA
gctcatcgctaatacatcaaatatcctaaagcatcaccttgggcgcgag

SEQ ID NO: 1293 - DNA, 38 bp, synthetic construct
  misc_feature 1..38: note = artificial DNA sequence
  source 1..38: mol_type = other DNA
ctatattttcatttggcaatcataaacgtaacaaagct

SEQ ID NO: 1294 - DNA, 42 bp, synthetic construct; identical to SEQ ID NO: 702
  misc_feature 1..42: note = artificial DNA sequence
  source 1..42: mol_type = other DNA

SEQ ID NO: 1295 - DNA, 38 bp, synthetic construct
  misc_feature 1..38: note = artificial DNA sequence
  source 1..38: mol_type = other DNA
aatcaacagttgaaaggaattttttgaggacgtgagcc

SEQ ID NO: 1296 - DNA, 31 bp, synthetic construct
  misc_feature 1..31: note = artificial DNA sequence
  source 1..31: mol_type = other DNA
taacaactagttggcaccacgctgagagcca

SEQ ID NO: 1297 - DNA, 32 bp, synthetic construct
  misc_feature 1..32: note = artificial DNA sequence
  source 1..32: mol_type = other DNA
accctgactattatagcaccgcttcgttttaa

SEQ ID NO: 1298 - DNA, 48 bp, synthetic construct
  misc_feature 1..48: note = artificial DNA sequence
  source 1..48: mol_type = other DNA
cgtcagcgtggtgctggtctgtgctttttgcgcgcatcgtataggtca

SEQ ID NO: 1299 - DNA, 42 bp, synthetic construct; identical to SEQ ID NO: 1095
  misc_feature 1..42: note = artificial DNA sequence
  source 1..42: mol_type = other DNA

SEQ ID NO: 1300 - DNA, 40 bp, synthetic construct
  misc_feature 1..40: note = artificial DNA sequence
  source 1..40: mol_type = other DNA
acactggtctttgctcgtcataaaatctggtcaatagatt

SEQ ID NO: 1301 - DNA, 48 bp, synthetic construct
  misc_feature 1..48: note = artificial DNA sequence
  source 1..48: mol_type = other DNA
tgttactttcaatccgccgggcgcgtccagcatttacaaagaacgtta

SEQ ID NO: 1302 - DNA, 42 bp, synthetic construct
  misc_feature 1..42: note = artificial DNA sequence
  source 1..42: mol_type = other DNA
tcatggtccgagtaaaagagtttatcttttttaaatatcttt

SEQ ID NO: 1303 - DNA, 48 bp, synthetic construct
  misc_feature 1..48: note = artificial DNA sequence
  source 1..48: mol_type = other DNA
tattactttttgccagcaactcgtaggagcactatgagccaaaggttt

SEQ ID NO: 1304 - DNA, 40 bp, synthetic construct
  misc_feature 1..40: note = artificial DNA sequence
  source 1..40: mol_type = other DNA
gaaccaccagcagaagattaaaaaaactgatagccctaaa

SEQ ID NO: 1305 - DNA, 37 bp, synthetic construct; identical to SEQ ID NO: 1103
  misc_feature 1..37: note = artificial DNA sequence
  source 1..37: mol_type = other DNA

SEQ ID NO: 1306 - DNA, 32 bp, synthetic construct
  misc_feature 1..32: note = artificial DNA sequence
  source 1..32: mol_type = other DNA
aaaatcctgtttgataagccggcgaacgtggc

SEQ ID NO: 1307 - DNA, 43 bp, synthetic construct; identical to SEQ ID NO: 1125
  misc_feature 1..43: note = artificial DNA sequence
  source 1..43: mol_type = other DNA

SEQ ID NO: 1308 - DNA, 44 bp, synthetic construct
  misc_feature 1..44: note = artificial DNA sequence
  source 1..44: mol_type = other DNA
cgattaatttttgggatttttaaacatttttgaggcattaaatc

SEQ ID NO: 1309 - DNA, 48 bp, synthetic construct
  misc_feature 1..48: note = artificial DNA sequence
  source 1..48: mol_type = other DNA
caggaagaaggggacgacgacagttagatggggatggcttacacgacc

SEQ ID NO: 1310 - DNA, 40 bp, synthetic construct
  misc_feature 1..40: note = artificial DNA sequence
  source 1..40: mol_type = other DNA
aaccggataacgagtaaggaattacgtttaccgatagcgt

SEQ ID NO: 1311 - DNA, 48 bp, synthetic construct
  misc_feature 1..48: note = artificial DNA sequence
  source 1..48: mol_type = other DNA
agtaacatttgtagaacgttttttattgccgttccggcaaatcggcct

SEQ ID NO: 1312 - DNA, 40 bp, synthetic construct
  misc_feature 1..40: note = artificial DNA sequence
  source 1..40: mol_type = other DNA
agagggaaataaaaacgttttaaaacagttgattcccaat

SEQ ID NO: 1313 - DNA, 36 bp, synthetic construct
  misc_feature 1..36: note = artificial DNA sequence
  source 1..36: mol_type = other DNA
ctggtgccggaaatctttccaatactgcggaatcgt

SEQ ID NO: 1314 - DNA, 48 bp, synthetic construct
  misc_feature 1..48: note = artificial DNA sequence
  source 1..48: mol_type = other DNA
gatacattcccaaatcagggaacctttgtatcatcgcctgataaattg

SEQ ID NO: 1315 - DNA, 34 bp, synthetic construct; identical to SEQ ID NO: 1120
  misc_feature 1..34: note = artificial DNA sequence
  source 1..34: mol_type = other DNA

SEQ ID NO: 1316 - DNA, 39 bp, synthetic construct
  misc_feature 1..39: note = artificial DNA sequence
  source 1..39: mol_type = other DNA
cagatgaaataccaagcgcgaaacaaagtacccttatgc

SEQ ID NO: 1317 - DNA, 40 bp, synthetic construct; identical to SEQ ID NO: 1112
  misc_feature 1..40: note = artificial DNA sequence
  source 1..40: mol_type = other DNA

SEQ ID NO: 1318 - DNA, 35 bp, synthetic construct
  misc_feature 1..35: note = artificial DNA sequence
  source 1..35: mol_type = other DNA
ctgattatcagatgttttttggcaattcgtctgaa

SEQ ID NO: 1319 - DNA, 47 bp, synthetic construct
  misc_feature 1..47: note = artificial DNA sequence
  source 1..47: mol_type = other DNA
ttaacacctctgacctgaaagcgtcagagatattaattttaaaagct

SEQ ID NO: 1320 - DNA, 44 bp, synthetic construct
  misc_feature 1..44: note = artificial DNA sequence
  source 1..44: mol_type = other DNA
tcaactaatgcagatacataagaactggctcattatcagcgatt

SEQ ID NO: 1321 - DNA, 33 bp, synthetic construct
  misc_feature 1..33: note = artificial DNA sequence
  source 1..33: mol_type = other DNA
caactttgcggataacctgtttaggtggcatca

SEQ ID NO: 1322 - DNA, 47 bp, synthetic construct
  misc_feature 1..47: note = artificial DNA sequence
  source 1..47: mol_type = other DNA
ggcaagataaaacagaggtgaggctgaaaaataaaccctcaatcaat

SEQ ID NO: 1323 - DNA, 40 bp, synthetic construct
  misc_feature 1..40: note = artificial DNA sequence
  source 1..40: mol_type = other DNA
aggctgtccatcacgcagtaataacatttttcacttggtg

SEQ ID NO: 1324 - DNA, 47 bp, synthetic construct
  misc_feature 1..47: note = artificial DNA sequence
  source 1..47: mol_type = other DNA
cgcaagaagtcattgcaggtcagtgaataagcgagtagagaatataa

SEQ ID NO: 1325 - DNA, 40 bp, synthetic construct; identical to SEQ ID NO: 1090
  misc_feature 1..40: note = artificial DNA sequence
  source 1..40: mol_type = other DNA

SEQ ID NO: 1326 - DNA, 39 bp, synthetic construct
  misc_feature 1..39: note = artificial DNA sequence
  source 1..39: mol_type = other DNA
cgagaggctttgtcagcagcaactaattgctttgaggat

SEQ ID NO: 1327 - DNA, 46 bp, synthetic construct; identical to SEQ ID NO: 1094
  misc_feature 1..46: note = artificial DNA sequence
  source 1..46: mol_type = other DNA

SEQ ID NO: 1328 - DNA, 39 bp, synthetic construct
  misc_feature 1..39: note = artificial DNA sequence
  source 1..39: mol_type = other DNA
ggcggcctaagaatttttagcgaaaatcccgtaaaaaaa

SEQ ID NO: 1329 - DNA, 46 bp, synthetic construct
  misc_feature 1..46: note = artificial DNA sequence
  source 1..46: mol_type = other DNA
cgctattacgccagccgacaatgacgccatccagctcatagcctca

SEQ ID NO: 1330 - DNA, 47 bp, synthetic construct
  misc_feature 1..47: note = artificial DNA sequence
  source 1..47: mol_type = other DNA
taactataagacgctgagaagagtcaatagtgccgacaaaaataagg

SEQ ID NO: 1331 - DNA, 46 bp, synthetic construct
  misc_feature 1..46: note = artificial DNA sequence
  source 1..46: mol_type = other DNA
tcctcattaaagcccagacgatcggtcataatcaaaattaccgacc

SEQ ID NO: 1332 - DNA, 46 bp, synthetic construct
  misc_feature 1..46: note = artificial DNA sequence
  source 1..46: mol_type = other DNA
gcaaagcggattgcatctttttaaaagaactatcatatttttccct

SEQ ID NO: 1333 - DNA, 34 bp, synthetic construct
  misc_feature 1..34: note = artificial DNA sequence
  source 1..34: mol_type = other DNA
ataaataaaatctttttaaaaatcaggccaggca

SEQ ID NO: 1334 - DNA, 45 bp, synthetic construct
  misc_feature 1..45: note = artificial DNA sequence
  source 1..45: mol_type = other DNA
tctagctgatgtagtagctttttttaacatccaataactgaaaag

SEQ ID NO: 1335 - DNA, 40 bp, synthetic construct
  misc_feature 1..40: note = artificial DNA sequence
  source 1..40: mol_type = other DNA
taaattttccgcttttataccgatagttgcgctggcgaaa

SEQ ID NO: 1336 - DNA, 47 bp, synthetic construct
  misc_feature 1..47: note = artificial DNA sequence
  source 1..47: mol_type = other DNA
taccattataccagcgccaaaaaacggccagtgccaagctttcagag

SEQ ID NO: 1337 - DNA, 47 bp, synthetic construct
  misc_feature 1..47: note = artificial DNA sequence
  source 1..47: mol_type = other DNA
ttagtatcttaccaacgctaatttgacattcaaccgattgagggagg

SEQ ID NO: 1338 - DNA, 46 bp, synthetic construct
  misc_feature 1..46: note = artificial DNA sequence
  source 1..46: mol_type = other DNA
caaaagggttcgcattaaacgtctcagcagctttttaaaaaatcat

SEQ ID NO: 1339 - DNA, 46 bp, synthetic construct
  misc_feature 1..46: note = artificial DNA sequence
  source 1..46: mol_type = other DNA
ttcgcgtctggccaaacagcttggcgggatcgtcaataagaataaa

SEQ ID NO: 1340 - DNA, 48 bp, synthetic construct
  misc_feature 1..48: note = artificial DNA sequence
  source 1..48: mol_type = other DNA
agagaatcgcaaatattcaaccgttgtgtaggtaaagattgcaatgcc

SEQ ID NO: 1341 - DNA, 44 bp, synthetic construct
  misc_feature 1..44: note = artificial DNA sequence
  source 1..44: mol_type = other DNA
gacgacaaatttaatgaagcctgtttttcatcatcaagtttgcc

SEQ ID NO: 1342 - DNA, 48 bp, synthetic construct
  misc_feature 1..48: note = artificial DNA sequence
  source 1..48: mol_type = other DNA
agagcctaatttgccaaggttttgaagcctgcatgttcagctaatgca

SEQ ID NO: 1343 - DNA, 44 bp, synthetic construct; identical to SEQ ID NO: 759
  misc_feature 1..44: note = artificial DNA sequence
  source 1..44: mol_type = other DNA

SEQ ID NO: 1344 - DNA, 34 bp, synthetic construct
  misc_feature 1..34: note = artificial DNA sequence
  source 1..34: mol_type = other DNA
aggaacaaggaaacgtataaaaatttttacgcag

SEQ ID NO: 1345 - DNA, 37 bp, synthetic construct
  misc_feature 1..37: note = artificial DNA sequence
  source 1..37: mol_type = other DNA
aagcaaactccaacgatcggtgcgggccccaactgtt

SEQ ID NO: 1346 - DNA, 32 bp, synthetic construct; identical to SEQ ID NO: 1137
  misc_feature 1..32: note = artificial DNA sequence
  source 1..32: mol_type = other DNA

SEQ ID NO: 1347 - DNA, 44 bp, synthetic construct
  misc_feature 1..44: note = artificial DNA sequence
  source 1..44: mol_type = other DNA
aaacgaacggctttgaccgatataagtttctttttttccatata

SEQ ID NO: 1348 - DNA, 48 bp, synthetic construct
  misc_feature 1..48: note = artificial DNA sequence
  source 1..48: mol_type = other DNA
cgttaacctaatattttgcctgaggatctacaaaggctatcgccaccc

SEQ ID NO: 1349 - DNA, 38 bp, synthetic construct
  misc_feature 1..38: note = artificial DNA sequence
  source 1..38: mol_type = other DNA
gttaaaggtgttaaataaaaataatgagtaagaagcct

SEQ ID NO: 1350 - DNA, 48 bp, synthetic construct
  misc_feature 1..48: note = artificial DNA sequence
  source 1..48: mol_type = other DNA
cgccagcatcagaaccccgcctccctcagagcgggttatagtgtgata

SEQ ID NO: 1351 - DNA, 47 bp, synthetic construct
  misc_feature 1..47: note = artificial DNA sequence
  source 1..47: mol_type = other DNA
tctttgaccccaccagtcatttttgacgttgggaagagaataccaca

SEQ ID NO: 1352 - DNA, 30 bp, synthetic construct
  misc_feature 1..30: note = artificial DNA sequence
  source 1..30: mol_type = other DNA
ttctactaataaaagtaatcgtaaaactag

SEQ ID NO: 1353 - DNA, 42 bp, synthetic construct
  misc_feature 1..42: note = artificial DNA sequence
  source 1..42: mol_type = other DNA
tcgcaaatggtcattgataatttttcagaaaagccccaaaaa

SEQ ID NO: 1354 - DNA, 48 bp, synthetic construct
  misc_feature 1..48: note = artificial DNA sequence
  source 1..48: mol_type = other DNA
atcggttgttagcaaaatttttttagcaataatttttaaccaggaaga

SEQ ID NO: 1355 - DNA, 32 bp, synthetic construct
  misc_feature 1..32: note = artificial DNA sequence
  source 1..32: mol_type = other DNA
ctcaggtttttggtttagtaccgcaatccaat

SEQ ID NO: 1356 - DNA, 48 bp, synthetic construct
  misc_feature 1..48: note = artificial DNA sequence
  source 1..48: mol_type = other DNA
agttaatttcatcttccgcaagacatccttgaaaacatagcgatagct

SEQ ID NO: 1357 - DNA, 49 bp, synthetic construct
  misc_feature 1..49: note = artificial DNA sequence
  source 1..49: mol_type = other DNA
ccgaacaaaaaagggctgtcacaagcgacagaggcatttttggccttga

SEQ ID NO: 1358 - DNA, 38 bp, synthetic construct
  misc_feature 1..38: note = artificial DNA sequence
  source 1..38: mol_type = other DNA
ttatttcacgtgggaacgagtaacaacccgtcgccttt

SEQ ID NO: 1359 - DNA, 49 bp, synthetic construct
  misc_feature 1..49: note = artificial DNA sequence
  source 1..49: mol_type = other DNA
cgaggcattttttagtaagatttagaaaatctacgttaatacgaaagag

SEQ ID NO: 1360 - DNA, 49 bp, synthetic construct
  misc_feature 1..49: note = artificial DNA sequence
  source 1..49: mol_type = other DNA
agtaattatgaccctgtaatatttttttttgcgggagagcataaagcta

SEQ ID NO: 1361 - DNA, 49 bp, synthetic construct
  misc_feature 1..49: note = artificial DNA sequence
  source 1..49: mol_type = other DNA
tgtctggattcggtcgcatcgcccacgcataattaagaggaagcctctt

SEQ ID NO: 1362 - DNA, 41 bp, synthetic construct
  misc_feature 1..41: note = artificial DNA sequence
  source 1..41: mol_type = other DNA
agcgccattcgccattcaaacgagaatgaccatttcattga

SEQ ID NO: 1363 - DNA, 48 bp, synthetic construct
  misc_feature 1..48: note = artificial DNA sequence
  source 1..48: mol_type = other DNA
aattgtaggaagggttttcccagtcacgacgttgaacgcaatttgctt

SEQ ID NO: 1364 - DNA, 30 bp, synthetic construct
  misc_feature 1..30: note = artificial DNA sequence
  source 1..30: mol_type = other DNA
tctctgagtttcagattgcgaataataatt

SEQ ID NO: 1365 - DNA, 54 bp, synthetic construct
  misc_feature 1..54: note = artificial DNA sequence
  source 1..54: mol_type = other DNA
atccccctatcagttgagagcaacctggctgaccttcattttttaagagtaatc

SEQ ID NO: 1366 - DNA, 33 bp, synthetic construct
  misc_feature 1..33: note = artificial DNA sequence
  source 1..33: mol_type = other DNA
tcgagggttgcaaggccctaaaggacggagtga

SEQ ID NO: 1367 - DNA, 40 bp, synthetic construct
  misc_feature 1..40: note = artificial DNA sequence
  source 1..40: mol_type = other DNA
tgacctaataaacaacgttatacaaattcttattacgagc

SEQ ID NO: 1368 - DNA, 56 bp, synthetic construct
  misc_feature 1..56: note = artificial DNA sequence
  source 1..56: mol_type = other DNA
tgaaaccatgttaaaatgagaaaggccggttgaggcaggtagaatggaagcaccgt

SEQ ID NO: 1369 - DNA, 39 bp, synthetic construct
  misc_feature 1..39: note = artificial DNA sequence
  source 1..39: mol_type = other DNA
ttaatgccggagagggtagctattatgatatttaaattg

SEQ ID NO: 1370 - DNA, 40 bp, synthetic construct
  misc_feature 1..40: note = artificial DNA sequence
  source 1..40: mol_type = other DNA
attagcgttcgatagcaaggaaccctcatatattttaaat

SEQ ID NO: 1371 - DNA, 40 bp, synthetic construct
  misc_feature 1..40: note = artificial DNA sequence
  source 1..40: mol_type = other DNA
agctttcatcaacgtcaggattagcaataggaacaacaac

SEQ ID NO: 1372 - DNA, 46 bp, synthetic construct
  misc_feature 1..46: note = artificial DNA sequence
  source 1..46: mol_type = other DNA
tatgcatttttctaaagtacggagagtacctttttttaattgctcc

SEQ ID NO: 1373 - DNA, 40 bp, synthetic construct
  misc_feature 1..40: note = artificial DNA sequence
  source 1..40: mol_type = other DNA
cgcataggggactaaacatgtcaatcatttttttgtaccc

SEQ ID NO: 1374 - DNA, 46 bp, synthetic construct
  misc_feature 1..46: note = artificial DNA sequence
  source 1..46: mol_type = other DNA
cggattgatttttcgtaatgggaaccgtgcatcgcgaaccagaccg

SEQ ID NO: 1375 - DNA, 40 bp, synthetic construct
  misc_feature 1..40: note = artificial DNA sequence
  source 1..40: mol_type = other DNA
ttgccatcaggagacagtcaaatcaccatcaattttgaga

SEQ ID NO: 1376 - DNA, 39 bp, synthetic construct
  misc_feature 1..39: note = artificial DNA sequence
  source 1..39: mol_type = other DNA
ctgatgcacacgccaccaccggaagccaccctcagagcc

SEQ ID NO: 1377 - DNA, 34 bp, synthetic construct
  misc_feature 1..34: note = artificial DNA sequence
  source 1..34: mol_type = other DNA
gtttgaaacaccggaaccagacctcagaaccgcc

SEQ ID NO: 1378 - DNA, 40 bp, synthetic construct; identical to SEQ ID NO: 780
  misc_feature 1..40: note = artificial DNA sequence
  source 1..40: mol_type = other DNA

SEQ ID NO: 1379 - DNA, 40 bp, synthetic construct
  misc_feature 1..40: note = artificial DNA sequence
  source 1..40: mol_type = other DNA
ttttcacctcaccagtagcaccataatcagtatcaataga

SEQ ID NO: 1380 - DNA, 40 bp, synthetic construct
  misc_feature 1..40: note = artificial DNA sequence
  source 1..40: mol_type = other DNA
tagcaacgcatgaggacactacgaaggcaccaacctaaaa

SEQ ID NO: 1381 - DNA, 39 bp, synthetic construct
  misc_feature 1..39: note = artificial DNA sequence
  source 1..39: mol_type = other DNA
agtctggagcaaacagagactaccgaaagacagcatcgg

SEQ ID NO: 1382 - DNA, 40 bp, synthetic construct
  misc_feature 1..40: note = artificial DNA sequence
  source 1..40: mol_type = other DNA
aggtctgagtaaaatacgtaatgcagtttccattaaacgg

SEQ ID NO: 1383 - DNA, 40 bp, synthetic construct
  misc_feature 1..40: note = artificial DNA sequence
  source 1..40: mol_type = other DNA
ctgaggcttgcagggaaacgagggttgtataagatgaacg

SEQ ID NO: 1384 - DNA, 40 bp, synthetic construct
  misc_feature 1..40: note = artificial DNA sequence
  source 1..40: mol_type = other DNA
gtctttccaaaagtaagcagataggtggagccggtgaatt

SEQ ID NO: 1385 - DNA, 40 bp, synthetic construct
  misc_feature 1..40: note = artificial DNA sequence
  source 1..40: mol_type = other DNA
ttgacaggttttcatagcccccttcaccggaaaaattcat

SEQ ID NO: 1386 - DNA, 46 bp, synthetic construct
  misc_feature 1..46: note = artificial DNA sequence
  source 1..46: mol_type = other DNA
gctattttgcataacggattcgccgcttatcccatcctaagctgtt

SEQ ID NO: 1387 - DNA, 38 bp, synthetic construct
  misc_feature 1..38: note = artificial DNA sequence
  source 1..38: mol_type = other DNA
tttatcattccaagaataatcgtttacgagaatggaaa

SEQ ID NO: 1388 - DNA, 41 bp, synthetic construct
  misc_feature 1..41: note = artificial DNA sequence
  source 1..41: mol_type = other DNA
aaaatcgctgccccaatagcaagcttaaaccataatatcat

SEQ ID NO: 1389 - DNA, 43 bp, synthetic construct
  misc_feature 1..43: note = artificial DNA sequence
  source 1..43: mol_type = other DNA
agataacccagggaagcgcattagacggagggtaagcctttac

SEQ ID NO: 1390 - DNA, 34 bp, synthetic construct
  misc_feature 1..34: note = artificial DNA sequence
  source 1..34: mol_type = other DNA
tcaagccgtttcactgccctctgtggtggtcata

SEQ ID NO: 1391 - DNA, 35 bp, synthetic construct
  misc_feature 1..35: note = artificial DNA sequence
  source 1..35: mol_type = other DNA
aaatagcattgagcgcagtaccgcactcatcgagt

SEQ ID NO: 1392 - DNA, 38 bp, synthetic construct
  misc_feature 1..38: note = artificial DNA sequence
  source 1..38: mol_type = other DNA
tctgaacaaagtcaggagaatttgaaccatgccgccag

SEQ ID NO: 1393 - DNA, 45 bp, synthetic construct
  misc_feature 1..45: note = artificial DNA sequence
  source 1..45: mol_type = other DNA
ccagaatcccacacaacctaaaggtcaagtttcactacgaactgt

SEQ ID NO: 1394 - DNA, 35 bp, synthetic construct
  misc_feature 1..35: note = artificial DNA sequence
  source 1..35: mol_type = other DNA
ttttaatcattgtgaattaaacggagagaactgac

SEQ ID NO: 1395 - DNA, 43 bp, synthetic construct
  misc_feature 1..43: note = artificial DNA sequence
  source 1..43: mol_type = other DNA
ttttgatactcaacatcaaaatagtgacgagaatggtttaatt

SEQ ID NO: 1396 - DNA, 33 bp, synthetic construct
  misc_feature 1..33: note = artificial DNA sequence
  source 1..33: mol_type = other DNA
taaaatgttggcttgagaacaccagattcatta

SEQ ID NO: 1397 - DNA, 38 bp, synthetic construct
  misc_feature 1..38: note = artificial DNA sequence
  source 1..38: mol_type = other DNA
cagtttgtcgcactccagccagctttccggtcagggtt

SEQ ID NO: 1398 - DNA, 27 bp, synthetic construct
  misc_feature 1..27: note = artificial DNA sequence
  source 1..27: mol_type = other DNA
taatgggtgggtcactgtggtttttct

SEQ ID NO: 1399 - DNA, 35 bp, synthetic construct; identical to SEQ ID NO: 1197
  misc_feature 1..35: note = artificial DNA sequence
  source 1..35: mol_type = other DNA

SEQ ID NO: 1400 - DNA, 44 bp, synthetic construct
  misc_feature 1..44: note = artificial DNA sequence
  source 1..44: mol_type = other DNA
agaaaggaagcacatcctcatatggaacaaatagggttgagtgt

SEQ ID NO: 1401 - DNA, 30 bp, synthetic construct
  misc_feature 1..30: note = artificial DNA sequence
  source 1..30: mol_type = other DNA
tcagttacggaacggtcggtggctttgccc

SEQ ID NO: 1402 - DNA, 40 bp, synthetic construct
  misc_feature 1..40: note = artificial DNA sequence
  source 1..40: mol_type = other DNA
ttaaacagtagggcttagtccagactagattatgtaaatg

SEQ ID NO: 1403 - DNA, 48 bp, synthetic construct
  misc_feature 1..48: note = artificial DNA sequence
  source 1..48: mol_type = other DNA
agttaccacaccacgcaacatatcatgtaataagccaacgctcagaat

SEQ ID NO: 1404 - DNA, 31 bp, synthetic construct
  misc_feature 1..31: note = artificial DNA sequence
  source 1..31: mol_type = other DNA
tgtttgggaataagtccagtataactagaaa

SEQ ID NO: 1405 - DNA, 38 bp, synthetic construct
  misc_feature 1..38: note = artificial DNA sequence
  source 1..38: mol_type = other DNA
cgcaaagagaaggaagaaaatacatacataaaggtact

SEQ ID NO: 1406 - DNA, 45 bp, synthetic construct
  misc_feature 1..45: note = artificial DNA sequence
  source 1..45: mol_type = other DNA
tcataattttaggcataattctattgagaatcgccatatttcagt

SEQ ID NO: 1407 - DNA, 38 bp, synthetic construct
  misc_feature 1..38: note = artificial DNA sequence
  source 1..38: mol_type = other DNA
tagcaacttcgagccagactcctatgtgaatttcttaa

SEQ ID NO: 1408 - DNA, 49 bp, synthetic construct
  misc_feature 1..49: note = artificial DNA sequence
  source 1..49: mol_type = other DNA
aggtaaaggaggcattaacgccaaaaaagaaatattacgcagtatattt

SEQ ID NO: 1409 - DNA, 48 bp, synthetic construct
  misc_feature 1..48: note = artificial DNA sequence
  source 1..48: mol_type = other DNA
tcttgttagcaaacgtaaccgaggataaaacgaaaggctccaaaagga

SEQ ID NO: 1410 - DNA, 40 bp, synthetic construct
  misc_feature 1..40: note = artificial DNA sequence
  source 1..40: mol_type = other DNA
tataaagtaaatttatccctccggcttaggttcaggtcat

SEQ ID NO: 1411 - DNA, 40 bp, synthetic construct
  misc_feature 1..40: note = artificial DNA sequence
  source 1..40: mol_type = other DNA
tgagccaaaagaactggcatgattaagtaataagagttct

SEQ ID NO: 1412 - DNA, 34 bp, synthetic construct
  misc_feature 1..34: note = artificial DNA sequence
  source 1..34: mol_type = other DNA
tgtagccgggtcggtttatcagcaataacggaat

SEQ ID NO: 1413 - DNA, 27 bp, synthetic construct
  misc_feature 1..27: note = artificial DNA sequence
  source 1..27: mol_type = other DNA
gactttttgctacagataacggaacat

SEQ ID NO: 1414 - DNA, 40 bp, synthetic construct
  misc_feature 1..40: note = artificial DNA sequence
  source 1..40: mol_type = other DNA
ttgtttattacaggtagaaagattccaaatgctttatagt

SEQ ID NO: 1415 - DNA, 39 bp, synthetic construct
  misc_feature 1..39: note = artificial DNA sequence
  source 1..39: mol_type = other DNA
tagttcagaaggctgcggaaagacttcatttttatatcg

SEQ ID NO: 1416 - DNA, 58 bp, synthetic construct
  misc_feature 1..58: note = artificial DNA sequence
  source 1..58: mol_type = other DNA
gcagtagagtaggtagagattaggcagattgtttttctgtatcttttgatacgttagc

SEQ ID NO: 1417 - DNA, 59 bp, synthetic construct
  misc_feature 1..59: note = artificial DNA sequence
  source 1..59: mol_type = other DNA
gcagtagagtaggtagagattaggcaaaaaagagccacgtctttccagactgctaaaca

SEQ ID NO: 1418 - DNA, 50 bp, synthetic construct
  misc_feature 1..50: note = artificial DNA sequence
  source 1..50: mol_type = other DNA
gcagtagagtaggtagagattaggcaggcgctagggcgcttagagcttga

SEQ ID NO: 1419 - DNA, 58 bp, synthetic construct
  misc_feature 1..58: note = artificial DNA sequence
  source 1..58: mol_type = other DNA
gcagtagagtaggtagagattaggcacgttggtgattatcatcaccagtcagagtttg

SEQ ID NO: 1420 - DNA, 50 bp, synthetic construct
  misc_feature 1..50: note = artificial DNA sequence
  source 1..50: mol_type = other DNA
gcagtagagtaggtagagattaggcacgctggcacgtgaacaaagaaacc

SEQ ID NO: 1421 - DNA, 50 bp, synthetic construct
  misc_feature 1..50: note = artificial DNA sequence
  source 1..50: mol_type = other DNA
gcagtagagtaggtagagattaggcattcgagcttcaaatgcgttttgcc

SEQ ID NO: 1422 - DNA, 58 bp, synthetic construct
  misc_feature 1..58: note = artificial DNA sequence
  source 1..58: mol_type = other DNA
gcagtagagtaggtagagattaggcagaatagaaggattctcacgcaaggcaccttcc

SEQ ID NO: 1423 - DNA, 56 bp, synthetic construct
  misc_feature 1..56: note = artificial DNA sequence
  source 1..56: mol_type = other DNA
gcagtagagtaggtagagattaggcaaaggcgatcagattaaatgtgagcaaacgg

SEQ ID NO: 1424 - DNA, 50 bp, synthetic construct; identical to SEQ ID NO: 829
  misc_feature 1..50: note = artificial DNA sequence
  source 1..50: mol_type = other DNA

SEQ ID NO: 1425 - DNA, 40 bp, synthetic construct
  misc_feature 1..40: note = artificial DNA sequence
  source 1..40: mol_type = other DNA
taccgctggtaatatcatacctaccctcgttaagggcgcg

SEQ ID NO: 1426 - DNA, 40 bp, synthetic construct
  misc_feature 1..40: note = artificial DNA sequence
  source 1..40: mol_type = other DNA
gcgaaagggggatgtgcagtgccatagcagccccagggtt

SEQ ID NO: 1427 - DNA, 45 bp, synthetic construct
  misc_feature 1..45: note = artificial DNA sequence
  source 1..45: mol_type = other DNA
cgtccgtgtcattaattgcgttgccgggtgatgccgggttacctg

SEQ ID NO: 1428 - DNA, 40 bp, synthetic construct
  misc_feature 1..40: note = artificial DNA sequence
  source 1..40: mol_type = other DNA
cagggaagcgcatttttttgacgggagaattaactgaaca

SEQ ID NO: 1429 - DNA, 44 bp, synthetic construct
  misc_feature 1..44: note = artificial DNA sequence
  source 1..44: mol_type = other DNA
cgcgcttaatgcgccgctacgaatcagaatcggaaccataccgg

SEQ ID NO: 1430 - DNA, 44 bp, synthetic construct
  misc_feature 1..44: note = artificial DNA sequence
  source 1..44: mol_type = other DNA
aatcgtcgtgatgcaaatctttttaatcgcaagacaaagatgat

SEQ ID NO: 1431 - DNA, 39 bp, synthetic construct
  misc_feature 1..39: note = artificial DNA sequence
  source 1..39: mol_type = other DNA
cgatggcctttggggtcgaggtggttcttcggggtttct

SEQ ID NO: 1432 - DNA, 39 bp, synthetic construct
  misc_feature 1..39: note = artificial DNA sequence
  source 1..39: mol_type = other DNA
ccagaatcttcacggtcctaaaggtcaagtttcactacg

SEQ ID NO: 1433 - DNA, 39 bp, synthetic construct
  misc_feature 1..39: note = artificial DNA sequence
  source 1..39: mol_type = other DNA
agtacataaatcaatatatgtgagtgtttttataacctt

SEQ ID NO: 1434 - DNA, 47 bp, synthetic construct
  misc_feature 1..47: note = artificial DNA sequence
  source 1..47: mol_type = other DNA
tgaaccatataacctctaatggaagggttagatcaatatttgctttg

SEQ ID NO: 1435 - DNA, 47 bp, synthetic construct
  misc_feature 1..47: note = artificial DNA sequence
  source 1..47: mol_type = other DNA
gagaataacataaaaagccagctgataaaatttttgaaacgcaaaga

SEQ ID NO: 1436 - DNA, 43 bp, synthetic construct
  misc_feature 1..43: note = artificial DNA sequence
  source 1..43: mol_type = other DNA
gcaagtttttccgtttttattgaggtttttttttaagccttaa

SEQ ID NO: 1437 - DNA, 47 bp, synthetic construct
  misc_feature 1..47: note = artificial DNA sequence
  source 1..47: mol_type = other DNA
cacccaaagagataaagaaattgacgtataattgatatatctgaatt

SEQ ID NO: 1438 - DNA, 47 bp, synthetic construct
  misc_feature 1..47: note = artificial DNA sequence
  source 1..47: mol_type = other DNA
tggtgtgttcagcaagagtaacatgtttttattgttccagtaagcgt

SEQ ID NO: 1439 - DNA, 47 bp, synthetic construct
  misc_feature 1..47: note = artificial DNA sequence
  source 1..47: mol_type = other DNA
ccctgcggctggtaatcgaattcgtgcggccagaatatacgagaggg

SEQ ID NO: 1440 - DNA, 40 bp, synthetic construct
  misc_feature 1..40: note = artificial DNA sequence
  source 1..40: mol_type = other DNA
agagccaccacccaatagaaaattcatttttatggtttac

SEQ ID NO: 1441 - DNA, 43 bp, synthetic construct
  misc_feature 1..43: note = artificial DNA sequence
  source 1..43: mol_type = other DNA
aaataataattaaaccaagtaccgtagttgctatatagaaggc

SEQ ID NO: 1442 - DNA, 47 bp, synthetic construct
  misc_feature 1..47: note = artificial DNA sequence
  source 1..47: mol_type = other DNA
caccctccacaaaattatttgcatttgtttacccaatccaaaataaa

SEQ ID NO: 1443 - DNA, 47 bp, synthetic construct
  misc_feature 1..47: note = artificial DNA sequence
  source 1..47: mol_type = other DNA
cgcagaggataacggaaggtgtattcagaaccacaaacaacgccacc

SEQ ID NO: 1444 - DNA, 39 bp, synthetic construct
  misc_feature 1..39: note = artificial DNA sequence
  source 1..39: mol_type = other DNA
catacatgaagttttaataaacagttaatgctaaacatc

SEQ ID NO: 1445 - DNA, 39 bp, synthetic construct
  misc_feature 1..39: note = artificial DNA sequence
  source 1..39: mol_type = other DNA
ccgatttacttctgaaaccggaaacaatcggcgaaacgt

SEQ ID NO: 1446 - DNA, 48 bp, synthetic construct
  misc_feature 1..48: note = artificial DNA sequence
  source 1..48: mol_type = other DNA
atttcattaaacaaaattaattaccccctgccagtaccagatgataca

SEQ ID NO: 1447 - DNA, 38 bp, synthetic construct
  misc_feature 1..38: note = artificial DNA sequence
  source 1..38: mol_type = other DNA
tccgaaagggcgaaaaaccgtcacagcgccaaggagcg

SEQ ID NO: 1448 - DNA, 38 bp, synthetic construct
  misc_feature 1..38: note = artificial DNA sequence
  source 1..38: mol_type = other DNA
acttgatttagtactacagtaacagtacagattttgca

SEQ ID NO: 1449 - DNA, 48 bp, synthetic construct
  misc_feature 1..48: note = artificial DNA sequence
  source 1..48: mol_type = other DNA
aaaggtggcaaaagttgggtaacgtttacagacccagctacaatttta

SEQ ID NO: 1450 - DNA, 48 bp, synthetic construct
  misc_feature 1..48: note = artificial DNA sequence
  source 1..48: mol_type = other DNA
agcaagcaaatccttttacatcgggaacgggttcccatcctaatttac

SEQ ID NO: 1451 - DNA, 43 bp, synthetic construct
  misc_feature 1..43: note = artificial DNA sequence
  source 1..43: mol_type = other DNA
cggtatgagcgctcacgtgtcactgccagcacgcagcaagcgg

SEQ ID NO: 1452 - DNA, 48 bp, synthetic construct
  misc_feature 1..48: note = artificial DNA sequence
  source 1..48: mol_type = other DNA
gtgcccgtacggggtcagtgccttcaatactttatcggcctaatcagt

SEQ ID NO: 1453 - DNA, 48 bp, synthetic construct
  misc_feature 1..48: note = artificial DNA sequence
  source 1..48: mol_type = other DNA
cagaacaaacggtacggaggccacgtgcactccggcatcacactgttg

SEQ ID NO: 1454 - DNA, 35 bp, synthetic construct
  misc_feature 1..35: note = artificial DNA sequence
  source 1..35: mol_type = other DNA
gcttctgtagcagaacgcgcctgtttttttatcaa

SEQ ID NO: 1455 - DNA, 43 bp, synthetic construct
  misc_feature 1..43: note = artificial DNA sequence
  source 1..43: mol_type = other DNA
ttcgtcacccgccaccagatttttccaccaccagagccgccgc

SEQ ID NO: 1456 - DNA, 43 bp, synthetic construct
  misc_feature 1..43: note = artificial DNA sequence
  source 1..43: mol_type = other DNA
tatccggtatctatcattaccgctttttcccaataagaacgcg

SEQ ID NO: 1457 - DNA, 40 bp, synthetic construct
  misc_feature 1..40: note = artificial DNA sequence
  source 1..40: mol_type = other DNA
atcaagatcactcatcgagaacaacaatagataagtcctg

SEQ ID NO: 1458 - DNA, 31 bp, synthetic construct
  misc_feature 1..31: note = artificial DNA sequence
  source 1..31: mol_type = other DNA
aggattaggatgccatttgtttttgaattag

SEQ ID NO: 1459 - DNA, 40 bp, synthetic construct
  misc_feature 1..40: note = artificial DNA sequence
  source 1..40: mol_type = other DNA
cattccaagagaaacacgaattatttttgctctatttcgg

SEQ ID NO: 1460 - DNA, 34 bp, synthetic construct
  misc_feature 1..34: note = artificial DNA sequence
  source 1..34: mol_type = other DNA
tttattttttttgtcacactgcaaggcgattcat

SEQ ID NO: 1461 - DNA, 48 bp, synthetic construct
  misc_feature 1..48: note = artificial DNA sequence
  source 1..48: mol_type = other DNA
ccaagttaccttacacgtttctttgctcgtcaatttaacagagcatgt

SEQ ID NO: 1462 - DNA, 48 bp, synthetic construct
  misc_feature 1..48: note = artificial DNA sequence
  source 1..48: mol_type = other DNA
gatgaatacgccaccccaccgtactcaggaggtagcggggtcatttca

SEQ ID NO: 1463 - DNA, 40 bp, synthetic construct
  misc_feature 1..40: note = artificial DNA sequence
  source 1..40: mol_type = other DNA
cggaagcataaagtgtaattgttaaccgagctgggtaaag

SEQ ID NO: 1464 - DNA, 42 bp, synthetic construct
  misc_feature 1..42: note = artificial DNA sequence
  source 1..42: mol_type = other DNA
ttgggaagggcgatcggtgcgggccttttttttcgctattac

SEQ ID NO: 1465 - DNA, 40 bp, synthetic construct; identical to SEQ ID NO: 855
  misc_feature 1..40: note = artificial DNA sequence
  source 1..40: mol_type = other DNA

SEQ ID NO: 1466 - DNA, 40 bp, synthetic construct
  misc_feature 1..40: note = artificial DNA sequence
  source 1..40: mol_type = other DNA
ccctcagagctagcccccttatttttttgcgtttgccatc

SEQ ID NO: 1467 - DNA, 47 bp, synthetic construct
  misc_feature 1..47: note = artificial DNA sequence
  source 1..47: mol_type = other DNA
tagaagaactcaaacctttgattaaattaaccgttgtagatcgttaa

SEQ ID NO: 1468 - DNA, 48 bp, synthetic construct
  misc_feature 1..48: note = artificial DNA sequence
  source 1..48: mol_type = other DNA
catcaagatgaattaccttttttaatggaaacaacaagaaagcaaaag

SEQ ID NO: 1469 - DNA, 40 bp, synthetic construct
  misc_feature 1..40: note = artificial DNA sequence
  source 1..40: mol_type = other DNA
cggcatttaacctattattctgaagaaacaaaattacctg

SEQ ID NO: 1470 - DNA, 42 bp, synthetic construct
  misc_feature 1..42: note = artificial DNA sequence
  source 1..42: mol_type = other DNA
ccagcgcatgcccgctagagagttgcgtgcctccgtggtggt

SEQ ID NO: 1471 - DNA, 55 bp, synthetic construct
  misc_feature 1..55: note = artificial DNA sequence
  source 1..55: mol_type = other DNA
gtaccgtatagcaagcccaatagaacctaccatatcgacgaggtggagccgccac

SEQ ID NO: 1472 - DNA, 49 bp, synthetic construct
  misc_feature 1..49: note = artificial DNA sequence
  source 1..49: mol_type = other DNA
acaggaggttgagttgacgctcaactgattatttgtttggatttggcaa

SEQ ID NO: 1473 - DNA, 55 bp, synthetic construct
  misc_feature 1..55: note = artificial DNA sequence
  source 1..55: mol_type = other DNA
gggaacggaacgatttcgtaaaacagaaccctactatggaatcctgacagatgat

SEQ ID NO: 1474 - DNA, 54 bp, synthetic construct
  misc_feature 1..54: note = artificial DNA sequence
  source 1..54: mol_type = other DNA
tcggtcaggagtgtactggtaatgcttttggcggataacccggaatttcgcctg

SEQ ID NO: 1475 - DNA, 54 bp, synthetic construct
  misc_feature 1..54: note = artificial DNA sequence
  source 1..54: mol_type = other DNA
cgtgctttattgcaggtcagacgattggccttagccagaaagtataggtgccgt

SEQ ID NO: 1476 - DNA, 52 bp, synthetic construct
  misc_feature 1..52: note = artificial DNA sequence
  source 1..52: mol_type = other DNA
ataaatcctcattaagatattcgccaccctcagaagccgtagattattgctt

SEQ ID NO: 1477 - DNA, 42 bp, synthetic construct; identical to SEQ ID NO: 702
  misc_feature 1..42: note = artificial DNA sequence
  source 1..42: mol_type = other DNA

SEQ ID NO: 1478 - DNA, 30 bp, synthetic construct
  misc_feature 1..30: note = artificial DNA sequence
  source 1..30: mol_type = other DNA
tagaagtaccattgctgaggcggtccctga

SEQ ID NO: 1479 - DNA, 42 bp, synthetic construct
  misc_feature 1..42: note = artificial DNA sequence
  source 1..42: mol_type = other DNA
gacgatggtgccggtttttgccccctccgcaagaatgccaac

SEQ ID NO: 1480 - DNA, 31 bp, synthetic construct
  misc_feature 1..31: note = artificial DNA sequence
  source 1..31: mol_type = other DNA
tctaaaataaccctcaattaacaccgcctgc

SEQ ID NO: 1481 - DNA, 50 bp, synthetic construct
  misc_feature 1..50: note = artificial DNA sequence
  source 1..50: mol_type = other DNA
ggggtcattgcaggcgctttttttcgcactcaatccgccgggcgcggttg

SEQ ID NO: 1482 - DNA, 49 bp, synthetic construct
  misc_feature 1..49: note = artificial DNA sequence
  source 1..49: mol_type = other DNA
gaaccgataatagattaaaagcatcgagccagcagcaaatgaacatgtt

SEQ ID NO: 1483 - DNA, 39 bp, synthetic construct
  misc_feature 1..39: note = artificial DNA sequence
  source 1..39: mol_type = other DNA
gtgtagcggtttttcacgctgcgttgccgccagcagggg

SEQ ID NO: 1484 - DNA, 40 bp, synthetic construct
  misc_feature 1..40: note = artificial DNA sequence
  source 1..40: mol_type = other DNA
aacagtgcgaagataagagcactaaatacattccggccag

SEQ ID NO: 1485 - DNA, 38 bp, synthetic construct
  misc_feature 1..38: note = artificial DNA sequence
  source 1..38: mol_type = other DNA
tataatgctgtagctcctcatcttggtcaatcataagg

SEQ ID NO: 1486 - DNA, 40 bp, synthetic construct
  misc_feature 1..40: note = artificial DNA sequence
  source 1..40: mol_type = other DNA
cggcaaacgcggtcccagcccgaggagtccactattaaag

SEQ ID NO: 1487 - DNA, 32 bp, synthetic construct
  misc_feature 1..32: note = artificial DNA sequence
  source 1..32: mol_type = other DNA
tgattcccaagaggtcgtacctttttgaaaga

SEQ ID NO: 1488 - DNA, 40 bp, synthetic construct
  misc_feature 1..40: note = artificial DNA sequence
  source 1..40: mol_type = other DNA
aacctgtccatcacgcagtaataacatttttcacttgagt

SEQ ID NO: 1489 - DNA, 48 bp, synthetic construct
  misc_feature 1..48: note = artificial DNA sequence
  source 1..48: mol_type = other DNA
ctattatacaaatatcccaaaataggacagatgaacggtgggaacgag

SEQ ID NO: 1490 - DNA, 40 bp, synthetic construct
  misc_feature 1..40: note = artificial DNA sequence
  source 1..40: mol_type = other DNA
gtctggtccggccaacagtgagacgggcaacaaaaagaat

SEQ ID NO: 1491 - DNA, 48 bp, synthetic construct
  misc_feature 1..48: note = artificial DNA sequence
  source 1..48: mol_type = other DNA
catcaacatctggccttcctgtagttttaaccattgcatcacacgacc

SEQ ID NO: 1492 - DNA, 52 bp, synthetic construct
  misc_feature 1..52: note = artificial DNA sequence
  source 1..52: mol_type = other DNA
gaaccctttacattggcagattccagaagcattttgcggaacaaaaacagcg

SEQ ID NO: 1493 - DNA, 34 bp, synthetic construct; identical to SEQ ID NO: 917
  misc_feature 1..34: note = artificial DNA sequence
  source 1..34: mol_type = other DNA

SEQ ID NO: 1494 - DNA, 40 bp, synthetic construct
  misc_feature 1..40: note = artificial DNA sequence
  source 1..40: mol_type = other DNA
atcgccattaaaatctctgatagcggctattagtctttaa

SEQ ID NO: 1495 - DNA, 48 bp, synthetic construct
  misc_feature 1..48: note = artificial DNA sequence
  source 1..48: mol_type = other DNA
aacgaaagtgccggacttgtagaaggcagccttgaggattactcgtat

SEQ ID NO: 1496 - DNA, 35 bp, synthetic construct
  misc_feature 1..35: note = artificial DNA sequence
  source 1..35: mol_type = other DNA
gagcggaattatcatttttcatattctcgtctgaa

SEQ ID NO: 1497 - DNA, 48 bp, synthetic construct
  misc_feature 1..48: note = artificial DNA sequence
  source 1..48: mol_type = other DNA
cgttattaaatcccgtgatcaaacggaaaaagagacgcagccagcttt

SEQ ID NO: 1498 - DNA, 48 bp, synthetic construct
  misc_feature 1..48: note = artificial DNA sequence
  source 1..48: mol_type = other DNA
tattactttttgccagttagacttgaaggttatggtgctgggcagcac

SEQ ID NO: 1499 - DNA, 36 bp, synthetic construct
  misc_feature 1..36: note = artificial DNA sequence
  source 1..36: mol_type = other DNA
tctccgtgggaacataacacgttaataaaacgaact

SEQ ID NO: 1500 - DNA, 37 bp, synthetic construct
  misc_feature 1..37: note = artificial DNA sequence
  source 1..37: mol_type = other DNA
attcgcgttaaatgtgagcgagtaacaaccaggcata

SEQ ID NO: 1501 - DNA, 37 bp, synthetic construct; identical to SEQ ID NO: 897
  misc_feature 1..37: note = artificial DNA sequence
  source 1..37: mol_type = other DNA

SEQ ID NO: 1502 - DNA, 40 bp, synthetic construct
  misc_feature 1..40: note = artificial DNA sequence
  source 1..40: mol_type = other DNA
aaaaatctgccaaaaggaattacgcgtcggatattcattg

SEQ ID NO: 1503 - DNA, 48 bp, synthetic construct
  misc_feature 1..48: note = artificial DNA sequence
  source 1..48: mol_type = other DNA
agaggcggccagcttacgtcggtggtgccatcaaatatcaatctttag

SEQ ID NO: 1504 - DNA, 48 bp, synthetic construct
  misc_feature 1..48: note = artificial DNA sequence
  source 1..48: mol_type = other DNA
aaaaaaagccgcacaggcggcttgcaaagcggaataggaagttaaatc

SEQ ID NO: 1505 - DNA, 41 bp, synthetic construct
  misc_feature 1..41: note = artificial DNA sequence
  source 1..41: mol_type = other DNA
agcgattataccaagcattcttaattgctgaagcaactaaa

SEQ ID NO: 1506 - DNA, 50 bp, synthetic construct
  misc_feature 1..50: note = artificial DNA sequence
  source 1..50: mol_type = other DNA
gttaaacgatgctgatcataaaaaattttaaaagttaaccaccacacccg

SEQ ID NO: 1507 - DNA, 48 bp, synthetic construct
  misc_feature 1..48: note = artificial DNA sequence
  source 1..48: mol_type = other DNA
atttttgcgcgcagactgaccccccattaaacgggtaaaatacgtaat

SEQ ID NO: 1508 - DNA, 47 bp, synthetic construct
  misc_feature 1..47: note = artificial DNA sequence
  source 1..47: mol_type = other DNA
tgcgcgaagcgaacgagtttagctaaagacttgtcagaagcaaaaga

SEQ ID NO: 1509 - DNA, 40 bp, synthetic construct
  misc_feature 1..40: note = artificial DNA sequence
  source 1..40: mol_type = other DNA
atataaaagggacattttttgaatcctaaaacgtggcaca

SEQ ID NO: 1510 - DNA, 43 bp, synthetic construct
  misc_feature 1..43: note = artificial DNA sequence
  source 1..43: mol_type = other DNA
aatttgtaacgtggactttttccaacgtcaaatcggcaaaatc

SEQ ID NO: 1511 - DNA, 42 bp, synthetic construct
  misc_feature 1..42: note = artificial DNA sequence
  source 1..42: mol_type = other DNA
ccacgctggtttgccgttttttcgtcttttcaccgcgcgggg

SEQ ID NO: 1512 - DNA, 38 bp, synthetic construct
  misc_feature 1..38: note = artificial DNA sequence
  source 1..38: mol_type = other DNA
atcaatatctggtcagttggtttttaaatccagccagc

SEQ ID NO: 1513 - DNA, 39 bp, synthetic construct
  misc_feature 1..39: note = artificial DNA sequence
  source 1..39: mol_type = other DNA
aagtacaaaggactaaagactttttcatgaggaagtttc

SEQ ID NO: 1514 - DNA, 47 bp, synthetic construct
  misc_feature 1..47: note = artificial DNA sequence
  source 1..47: mol_type = other DNA
aacagaggtctgacctgaaagcgtcagagatataaatcctttgcaag

SEQ ID NO: 1515 - DNA, 39 bp, synthetic construct
  misc_feature 1..39: note = artificial DNA sequence
  source 1..39: mol_type = other DNA
gataaaaacaggacgttgggaagggctcattgtaatagt

SEQ ID NO: 1516 - DNA, 40 bp, synthetic construct
  misc_feature 1..40: note = artificial DNA sequence
  source 1..40: mol_type = other DNA
cagaggggataccagtgcgttttaaggtcaggattagaga

SEQ ID NO: 1517 - DNA, 47 bp, synthetic construct
  misc_feature 1..47: note = artificial DNA sequence
  source 1..47: mol_type = other DNA
agggtaaaagcacatcctcaactgaccaactaattgctcgaagcccg

SEQ ID NO: 1518 - DNA, 42 bp, synthetic construct
  misc_feature 1..42: note = artificial DNA sequence
  source 1..42: mol_type = other DNA
gcgcgcctcgagtaaaagagtagttgatttttaggaattgag

SEQ ID NO: 1519 - DNA, 47 bp, synthetic construct
  misc_feature 1..47: note = artificial DNA sequence
  source 1..47: mol_type = other DNA
aatataccgaacgaaccaccagcacacgctgaaccttgctgaacctc

SEQ ID NO: 1520 - DNA, 39 bp, synthetic construct
  misc_feature 1..39: note = artificial DNA sequence
  source 1..39: mol_type = other DNA
gccactacgaatacactaaaacaaaaaatctcttttgat

SEQ ID NO: 1521 - DNA, 44 bp, synthetic construct
  misc_feature 1..44: note = artificial DNA sequence
  source 1..44: mol_type = other DNA
acgagtagtaaattgggcttgatcaagagtaatcttaggctttg

SEQ ID NO: 1522 - DNA, 44 bp, synthetic construct
  misc_feature 1..44: note = artificial DNA sequence
  source 1..44: mol_type = other DNA
cgattaatttttgggatttttaaacatttttgaggctacaaaca

SEQ ID NO: 1523 - DNA, 39 bp, synthetic construct
  misc_feature 1..39: note = artificial DNA sequence
  source 1..39: mol_type = other DNA
gagagataaagaatttttagcgaatgtttaccagtcccg

SEQ ID NO: 1524 - DNA, 46 bp, synthetic construct
  misc_feature 1..46: note = artificial DNA sequence
  source 1..46: mol_type = other DNA
gacaatatctggccaaaagaatacaatagatacaactaacggaacg

SEQ ID NO: 1525 - DNA, 45 bp, synthetic construct; identical to SEQ ID NO: 913
  misc_feature 1..45: note = artificial DNA sequence
  source 1..45: mol_type = other DNA

SEQ ID NO: 1526 - DNA, 46 bp, synthetic construct
  misc_feature 1..46: note = artificial DNA sequence
  source 1..46: mol_type = other DNA
cggctggaggtgtccagcatcagctaatgaatagcagcaagcatca

SEQ ID NO: 1527 - DNA, 40 bp, synthetic construct
  misc_feature 1..40: note = artificial DNA sequence
  source 1..40: mol_type = other DNA
gactttctccgtggtgaagggatagctctcacttaaattt

SEQ ID NO: 1528 - DNA, 54 bp, synthetic construct
  misc_feature 1..54: note = artificial DNA sequence
  source 1..54: mol_type = other DNA
tacaggtaaggcttgctgtgaattaaattgtgtcgaaattttttcgcgacctgc

SEQ ID NO: 1529 - DNA, 39 bp, synthetic construct
  misc_feature 1..39: note = artificial DNA sequence
  source 1..39: mol_type = other DNA
taatgtgtaggtaaaatttatcattcttaaacagcttga

SEQ ID NO: 1530 - DNA, 40 bp, synthetic construct
  misc_feature 1..40: note = artificial DNA sequence
  source 1..40: mol_type = other DNA
agccccaaaaacaccataaatcaacgtaaaacaataataa

SEQ ID NO: 1531 - DNA, 39 bp, synthetic construct
  misc_feature 1..39: note = artificial DNA sequence
  source 1..39: mol_type = other DNA
tttatttcaacgcaaggataaaagaccctgtgagatcta

SEQ ID NO: 1532 - DNA, 39 bp, synthetic construct
  misc_feature 1..39: note = artificial DNA sequence
  source 1..39: mol_type = other DNA
ttagcgaccctgaacaaagtcagcgcaactgcaccacgg

SEQ ID NO: 1533 - DNA, 39 bp, synthetic construct
  misc_feature 1..39: note = artificial DNA sequence
  source 1..39: mol_type = other DNA
aagacaaacattaaagcccaaaagttaaataattataca

SEQ ID NO: 1534 - DNA, 38 bp, synthetic construct
  misc_feature 1..38: note = artificial DNA sequence
  source 1..38: mol_type = other DNA
tacggtgtctggccaaaggccggagacagtcgcataac

SEQ ID NO: 1535 - DNA, 38 bp, synthetic construct
  misc_feature 1..38: note = artificial DNA sequence
  source 1..38: mol_type = other DNA
aaaatgttttttttgactggaccttatgctttttattt

SEQ ID NO: 1536 - DNA, 40 bp, synthetic construct
  misc_feature 1..40: note = artificial DNA sequence
  source 1..40: mol_type = other DNA
cagtacaactcatagttagcgtaacgatcaagcagcgcca

SEQ ID NO: 1537 - DNA, 39 bp, synthetic construct
  misc_feature 1..39: note = artificial DNA sequence
  source 1..39: mol_type = other DNA
agactccttctttccaagcgccattcgccattcaggctg

SEQ ID NO: 1538 - DNA, 40 bp, synthetic construct
  misc_feature 1..40: note = artificial DNA sequence
  source 1..40: mol_type = other DNA
tggagcaatcggtttaaaaggaacaactaaagcgacgaca

SEQ ID NO: 1539 - DNA, 38 bp, synthetic construct
  misc_feature 1..38: note = artificial DNA sequence
  source 1..38: mol_type = other DNA
taattgtaacaagagacaatcataattagcagtggcat

SEQ ID NO: 1540 - DNA, 38 bp, synthetic construct
  misc_feature 1..38: note = artificial DNA sequence
  source 1..38: mol_type = other DNA
caattctattaatattaagcaaatatttaaatattttc

SEQ ID NO: 1541 - DNA, 40 bp, synthetic construct
  misc_feature 1..40: note = artificial DNA sequence
  source 1..40: mol_type = other DNA
aatagtgagcagggagttaaaggctcggtcgctgaggctt

SEQ ID NO: 1542 - DNA, 37 bp, synthetic construct
  misc_feature 1..37: note = artificial DNA sequence
  source 1..37: mol_type = other DNA
cagaaaacgagaagcatcgtaaccgttacgttggtgt

SEQ ID NO: 1543 - DNA, 40 bp, synthetic construct
  misc_feature 1..40: note = artificial DNA sequence
  source 1..40: mol_type = other DNA
cattccacgattgaggagtagcattaacacaccctcagag

SEQ ID NO: 1544 - DNA, 34 bp, synthetic construct
  misc_feature 1..34: note = artificial DNA sequence
  source 1..34: mol_type = other DNA
acggaacaactatttttatgcagatacaaacggc

SEQ ID NO: 1545 - DNA, 40 bp, synthetic construct
  misc_feature 1..40: note = artificial DNA sequence
  source 1..40: mol_type = other DNA
gccggaaacaccggttgtaccaaaaacattatatttttag

SEQ ID NO: 1546 - DNA, 40 bp, synthetic construct
  misc_feature 1..40: note = artificial DNA sequence
  source 1..40: mol_type = other DNA
cgcctgatatcgcccacaaatcaccatctttttatatgat

SEQ ID NO: 1547 - DNA, 34 bp, synthetic construct
  misc_feature 1..34: note = artificial DNA sequence
  source 1..34: mol_type = other DNA
catcttctatcgatagcagcagactcctcaagag

SEQ ID NO: 1548 - DNA, 40 bp, synthetic construct
  misc_feature 1..40: note = artificial DNA sequence
  source 1..40: mol_type = other DNA
ctccaaaaggagcctttaccgatagggtagctagggtgag

SEQ ID NO: 1549 - DNA, 33 bp, synthetic construct
  misc_feature 1..33: note = artificial DNA sequence
  source 1..33: mol_type = other DNA
caacagttaattcaaccagacagccactacaac

SEQ ID NO: 1550 - DNA, 40 bp, synthetic construct
  misc_feature 1..40: note = artificial DNA sequence
  source 1..40: mol_type = other DNA
ttagcaagattgacggcactccaataaatcatacaggcaa

SEQ ID NO: 1551 - DNA, 32 bp, synthetic construct
  misc_feature 1..32: note = artificial DNA sequence
  source 1..32: mol_type = other DNA
agatgggcactccagccagctttcgcctcagg

SEQ ID NO: 1552 - DNA, 39 bp, synthetic construct
  misc_feature 1..39: note = artificial DNA sequence
  source 1..39: mol_type = other DNA
ggttatattgaccgtaatcagtagtgtagcgcgttttca

SEQ ID NO: 1553 - DNA, 40 bp, synthetic construct
  misc_feature 1..40: note = artificial DNA sequence
  source 1..40: mol_type = other DNA
atcaaaatcgtcaccacattaccaataaggcgaactggca

SEQ ID NO: 1554 - DNA, 41 bp, synthetic construct
  misc_feature 1..41: note = artificial DNA sequence
  source 1..41: mol_type = other DNA
atattttacaataaacaaagcctgtttagtatataggcgtt

SEQ ID NO: 1555 - DNA, 48 bp, synthetic construct
  misc_feature 1..48: note = artificial DNA sequence
  source 1..48: mol_type = other DNA
taccgtcgtatcaggttgcctgagaaccctcatatattttgcctttag

SEQ ID NO: 1556 - DNA, 45 bp, synthetic construct
  misc_feature 1..45: note = artificial DNA sequence
  source 1..45: mol_type = other DNA
tgcgggagaagaagtttctttttttccatataacagtttaaatat

SEQ ID NO: 1557 - DNA, 49 bp, synthetic construct
  misc_feature 1..49: note = artificial DNA sequence
  source 1..49: mol_type = other DNA
agtaattttcatttggggcgctttttagctgaaaagtttcgcaaatggt

SEQ ID NO: 1558 - DNA, 32 bp, synthetic construct
  misc_feature 1..32: note = artificial DNA sequence
  source 1..32: mol_type = other DNA
acatgatttttagtattaagaggcaactatat

SEQ ID NO: 1559 - DNA, 48 bp, synthetic construct
  misc_feature 1..48: note = artificial DNA sequence
  source 1..48: mol_type = other DNA
gattcaaaatttttgaaatactttaaattaagcaataaagggcaaaga

SEQ ID NO: 1560 - DNA, 48 bp, synthetic construct
  misc_feature 1..48: note = artificial DNA sequence
  source 1..48: mol_type = other DNA
ttttcatacgtcagaccgacagaatcaagtttctttttaatttaatgg

SEQ ID NO: 1561 - DNA, 41 bp, synthetic construct
  misc_feature 1..41: note = artificial DNA sequence
  source 1..41: mol_type = other DNA
gattgaccgtaatgggataggaataccacattcaacattat

SEQ ID NO: 1562 - DNA, 48 bp, synthetic construct
  misc_feature 1..48: note = artificial DNA sequence
  source 1..48: mol_type = other DNA
gaaaactttttcaaatgtaaatgcctattaattaattttcccttagaa

SEQ ID NO: 1563 - DNA, 48 bp, synthetic construct
  misc_feature 1..48: note = artificial DNA sequence
  source 1..48: mol_type = other DNA
aataacctgtagatttagtttttttgaccattacggtaatgccggaga

SEQ ID NO: 1564 - DNA, 49 bp, synthetic construct
  misc_feature 1..49: note = artificial DNA sequence
  source 1..49: mol_type = other DNA
aactttatttttatcatcctgacgacccaaatcaacgtaacagcagcga

SEQ ID NO: 1565 - DNA, 48 bp, synthetic construct
  misc_feature 1..48: note = artificial DNA sequence
  source 1..48: mol_type = other DNA
acctcccgacttgcggttcatcgtaggaagaaaacatgttcagctaat

SEQ ID NO: 1566 - DNA, 29 bp, synthetic construct
  misc_feature 1..29: note = artificial DNA sequence
  source 1..29: mol_type = other DNA
tcagaaagtagattttgctaaacaacttt

SEQ ID NO: 1567 - DNA, 47 bp, synthetic construct
  misc_feature 1..47: note = artificial DNA sequence
  source 1..47: mol_type = other DNA
cataattatctaagaacgcgaataagcaaacgtagaaaatacataca

SEQ ID NO: 1568 - DNA, 46 bp, synthetic construct
  misc_feature 1..46: note = artificial DNA sequence
  source 1..46: mol_type = other DNA
cctcagaggagagtccaaaggcaggtgaataaatcatagaagagtc

SEQ ID NO: 1569 - DNA, 48 bp, synthetic construct
  misc_feature 1..48: note = artificial DNA sequence
  source 1..48: mol_type = other DNA
cataaagctaaatcggaaccagagctcagagcaaattattagggcgac

SEQ ID NO: 1570 - DNA, 42 bp, synthetic construct
  misc_feature 1..42: note = artificial DNA sequence
  source 1..42: mol_type = other DNA
ggatggcttagagcaaccgttttttctagctgataaattaat

SEQ ID NO: 1571 - DNA, 44 bp, synthetic construct
  misc_feature 1..44: note = artificial DNA sequence
  source 1..44: mol_type = other DNA
gacaatgacaacaaccatctccaaggaagctttttaactccaac

SEQ ID NO: 1572 - DNA, 46 bp, synthetic construct
  misc_feature 1..46: note = artificial DNA sequence
  source 1..46: mol_type = other DNA
tgtaccccggttggagagaatagtcagcttgcttaccgtgtgataa

SEQ ID NO: 1573 - DNA, 47 bp, synthetic construct
  misc_feature 1..47: note = artificial DNA sequence
  source 1..47: mol_type = other DNA
aacggctacaggacaagaatttttcggatattcattagaaacaccag

SEQ ID NO: 1574 - DNA, 46 bp, synthetic construct
  misc_feature 1..46: note = artificial DNA sequence
  source 1..46: mol_type = other DNA
gccagtttgaggggagaattgcgtagcatgtatcgatgaagataca

SEQ ID NO: 1575 - DNA, 46 bp, synthetic construct
  misc_feature 1..46: note = artificial DNA sequence
  source 1..46: mol_type = other DNA
aattcgcattttttaaatttttcgccatcaaaatgctttaaacagt

SEQ ID NO: 1576 - DNA, 44 bp, synthetic construct
  misc_feature 1..44: note = artificial DNA sequence
  source 1..44: mol_type = other DNA
gacgacgagttaatttaccggaatagccagcatcaccgtcaccg

SEQ ID NO: 1577 - DNA, 49 bp, synthetic construct
  misc_feature 1..49: note = artificial DNA sequence
  source 1..49: mol_type = other DNA
accagaccaaaaaaggttttttcacgttgaaaatagcgtccaagcatct

SEQ ID NO: 1578 - DNA, 44 bp, synthetic construct
  misc_feature 1..44: note = artificial DNA sequence
  source 1..44: mol_type = other DNA
cggagttttttttgtatcataagacagcatcggaacgagggtag

SEQ ID NO: 1579 - DNA, 46 bp, synthetic construct
  misc_feature 1..46: note = artificial DNA sequence
  source 1..46: mol_type = other DNA
attcgatttttcttcaaagcgaaaatcaggtttttctttaccctga

SEQ ID NO: 1580 - DNA, 49 bp, synthetic construct
  misc_feature 1..49: note = artificial DNA sequence
  source 1..49: mol_type = other DNA
agggtaatagtatgttacggaatagtgaattaaaatcaccggaaccgcc

SEQ ID NO: 1581 - DNA, 47 bp, synthetic construct
  misc_feature 1..47: note = artificial DNA sequence
  source 1..47: mol_type = other DNA
cctccggcaaacatagcgatagcttagattaacttaattgtttgaaa

SEQ ID NO: 1582 - DNA, 46 bp, synthetic construct
  misc_feature 1..46: note = artificial DNA sequence
  source 1..46: mol_type = other DNA
tcagaaccgccaccccaccaccagtagcacatgaaaccgacctaaa

SEQ ID NO: 1583 - DNA, 47 bp, synthetic construct
  misc_feature 1..47: note = artificial DNA sequence
  source 1..47: mol_type = other DNA
caaaatcgagaaaccaatcaaggttccgctcacaattccacactaat

SEQ ID NO: 1584 - DNA, 39 bp, synthetic construct
  misc_feature 1..39: note = artificial DNA sequence
  source 1..39: mol_type = other DNA
tgagaacttccttattcctgaattaacgtcattcccagt

SEQ ID NO: 1585 - DNA, 49 bp, synthetic construct
  misc_feature 1..49: note = artificial DNA sequence
  source 1..49: mol_type = other DNA
ccgtaatcggctgtctatacgagccagccatacttaccaacgctagttt

SEQ ID NO: 1586 - DNA, 35 bp, synthetic construct
  misc_feature 1..35: note = artificial DNA sequence
  source 1..35: mol_type = other DNA
tagcgtctttcaatgaaaaagctttcagttgtaaa

SEQ ID NO: 1587 - DNA, 47 bp, synthetic construct
  misc_feature 1..47: note = artificial DNA sequence
  source 1..47: mol_type = other DNA
tgggtaactcacatagctgtttcctgtgtgaaaagcctgtcacagtt

SEQ ID NO: 1588 - DNA, 47 bp, synthetic construct
  misc_feature 1..47: note = artificial DNA sequence
  source 1..47: mol_type = other DNA
tgtggtgctaatcatggagcctccgggtgcctaatgagtgagcgagt

SEQ ID NO: 1589 - DNA, 47 bp, synthetic construct
  misc_feature 1..47: note = artificial DNA sequence
  source 1..47: mol_type = other DNA
tagctacaaataagagaggatcctgagcggcgggccgttctgagaag

SEQ ID NO: 1590 - DNA, 47 bp, synthetic construct
  misc_feature 1..47: note = artificial DNA sequence
  source 1..47: mol_type = other DNA
ttcaggttttatttatacgtcaaacagagcctaatttgccagtccgt

SEQ ID NO: 1591 - DNA, 38 bp, synthetic construct
  misc_feature 1..38: note = artificial DNA sequence
  source 1..38: mol_type = other DNA
tctggcacttagcctacagaccttaatttctaagaact

SEQ ID NO: 1592 - DNA, 37 bp, synthetic construct
  misc_feature 1..37: note = artificial DNA sequence
  source 1..37: mol_type = other DNA
gcgaaacatccatgtttgaccttcagatggtaggcgt

SEQ ID NO: 1593 - DNA, 37 bp, synthetic construct
  misc_feature 1..37: note = artificial DNA sequence
  source 1..37: mol_type = other DNA
ttttaccttctttagtgatgaattaagaggagccgtc

SEQ ID NO: 1594 - DNA, 30 bp, synthetic construct
  misc_feature 1..30: note = artificial DNA sequence
  source 1..30: mol_type = other DNA
gcgagaggcagacgacaacactatcataat

SEQ ID NO: 1595 - DNA, 41 bp, synthetic construct
  misc_feature 1..41: note = artificial DNA sequence
  source 1..41: mol_type = other DNA
aggcaaaagaaggcaccaacctaaccacgcaatttgcgtat

SEQ ID NO: 1596 - DNA, 33 bp, synthetic construct
  misc_feature 1..33: note = artificial DNA sequence
  source 1..33: mol_type = other DNA
tgccagggtggtttttctcgtcgctcgtcagcg

SEQ ID NO: 1597 - DNA, 44 bp, synthetic construct
  misc_feature 1..44: note = artificial DNA sequence
  source 1..44: mol_type = other DNA
agaaaggaattgggcggttgtgtggaacaaatagggttgagtgt

SEQ ID NO: 1598 - DNA, 30 bp, synthetic construct
  misc_feature 1..30: note = artificial DNA sequence
  source 1..30: mol_type = other DNA
tcagtttacatcgatgccgttcattcgaca

SEQ ID NO: 1599 - DNA, 49 bp, synthetic construct
  misc_feature 1..49: note = artificial DNA sequence
  source 1..49: mol_type = other DNA
tttttgagcaagaaacaatttttaagccaggcaagacgttagtaaatga

SEQ ID NO: 1600 - DNA, 50 bp, synthetic construct
  misc_feature 1..50: note = artificial DNA sequence
  source 1..50: mol_type = other DNA
tgtatggtcgcggcaccgcttctggtgccggaaaaaaagtaagcattttt

SEQ ID NO: 1601 - DNA, 46 bp, synthetic construct
  misc_feature 1..46: note = artificial DNA sequence
  source 1..46: mol_type = other DNA
tttttcagttgagatttaggtcactgcggaatcgttttttataaat

SEQ ID NO: 1602 - DNA, 42 bp, synthetic construct
  misc_feature 1..42: note = artificial DNA sequence
  source 1..42: mol_type = other DNA
tttttttaacaacgccaaccagtataaagccaacgctttttt

SEQ ID NO: 1603 - DNA, 49 bp, synthetic construct
  misc_feature 1..49: note = artificial DNA sequence
  source 1..49: mol_type = other DNA
atcttaccaaccgagcacaagaattaggcagaggcattttcgagttttt

SEQ ID NO: 1604 - DNA, 41 bp, synthetic construct
  misc_feature 1..41: note = artificial DNA sequence
  source 1..41: mol_type = other DNA
aagtaataatataaagtaccgacagaatcgccatatttttt

SEQ ID NO: 1605 - DNA, 47 bp, synthetic construct
  misc_feature 1..47: note = artificial DNA sequence
  source 1..47: mol_type = other DNA
tttttcaacagtaggggacgctgaggtctgagagactacaaatgcaa

SEQ ID NO: 1606 - DNA, 49 bp, synthetic construct
  misc_feature 1..49: note = artificial DNA sequence
  source 1..49: mol_type = other DNA
cagaaggagaagccctgaaatagcaatagcttgagcgctaatatttttt

SEQ ID NO: 1607 - DNA, 42 bp, synthetic construct
  misc_feature 1..42: note = artificial DNA sequence
  source 1..42: mol_type = other DNA
tttttcagagagataaccgaaacgcacatatgcggaataaac

SEQ ID NO: 1608 - DNA, 32 bp, synthetic construct
  misc_feature 1..32: note = artificial DNA sequence
  source 1..32: mol_type = other DNA
tttttttcagtgaatagaaagattcatttttt

SEQ ID NO: 1609 - DNA, 50 bp, synthetic construct
  misc_feature 1..50: note = artificial DNA sequence
  source 1..50: mol_type = other DNA
aaaaggtaaattcttacatgtaatttgagttaagcccaataataattttt

SEQ ID NO: 1610 - DNA, 41 bp, synthetic construct
  misc_feature 1..41: note = artificial DNA sequence
  source 1..41: mol_type = other DNA
tttttccagtaataagagtctgtccatccttgattaggttg

SEQ ID NO: 1611 - DNA, 55 bp, synthetic construct
  misc_feature 1..55: note = artificial DNA sequence
  source 1..55: mol_type = other DNA
tttttgatagccgaacaaagttactgatttcagcggagtaggtaaatcattgcct

SEQ ID NO: 1612 - DNA, 56 bp, synthetic construct
  misc_feature 1..56: note = artificial DNA sequence
  source 1..56: mol_type = other DNA
gttgcgcccgatatatcgcttttgcgggatcgtcaccctcaaagctgctcattttt

SEQ ID NO: 1613 - DNA, 58 bp, synthetic construct
  misc_feature 1..58: note = artificial DNA sequence
  source 1..58: mol_type = other DNA
gcagtagagtaggtagagattaggcaggcaattcgaacccatcagcattgacgaccgc

SEQ ID NO: 1614 - DNA, 58 bp, synthetic construct
  misc_feature 1..58: note = artificial DNA sequence
  source 1..58: mol_type = other DNA
gcagtagagtaggtagagattaggcaacgacggcatctcattttcagggaacactgag

SEQ ID NO: 1615 - DNA, 50 bp, synthetic construct
  misc_feature 1..50: note = artificial DNA sequence
  source 1..50: mol_type = other DNA
gcagtagagtaggtagagattaggcaggcgctagggcgcatagagcttga

SEQ ID NO: 1616 - DNA, 58 bp, synthetic construct
  misc_feature 1..58: note = artificial DNA sequence
  source 1..58: mol_type = other DNA
gcagtagagtaggtagagattaggcaagctcattagaaaccacaccagtcaaaccgaa

SEQ ID NO: 1617 - DNA, 50 bp, synthetic construct
  misc_feature 1..50: note = artificial DNA sequence
  source 1..50: mol_type = other DNA
gcagtagagtaggtagagattaggcactgctcatcgttgagtaacattat

SEQ ID NO: 1618 - DNA, 58 bp, synthetic construct
  misc_feature 1..58: note = artificial DNA sequence
  source 1..58: mol_type = other DNA
gcagtagagtaggtagagattaggcaaatccccctcaaaataagttttgcgtaagagc

SEQ ID NO: 1619 - DNA, 58 bp, synthetic construct
  misc_feature 1..58: note = artificial DNA sequence
  source 1..58: mol_type = other DNA
gcagtagagtaggtagagattaggcagcctgtagtgtaaacgctaatagtgaggataa

SEQ ID NO: 1620 - DNA, 56 bp, synthetic construct
  misc_feature 1..56: note = artificial DNA sequence
  source 1..56: mol_type = other DNA
gcagtagagtaggtagagattaggcaaagatcgctgaggaagattgtatttgttaa

SEQ ID NO: 1621 - DNA, 50 bp, synthetic construct
  misc_feature 1..50: note = artificial DNA sequence
  source 1..50: mol_type = other DNA
gcagtagagtaggtagagattaggcaaattaaagttttgtcgtattacgc

SEQ ID NO: 1622 - DNA, 44 bp, synthetic construct
  misc_feature 1..44: note = artificial DNA sequence
  source 1..44: mol_type = other DNA
cgcgcttaatgcgccgctacgaatcagaatcggaactaccgggg

SEQ ID NO: 1623 - DNA, 44 bp, synthetic construct
  misc_feature 1..44: note = artificial DNA sequence
  source 1..44: mol_type = other DNA
agtacatattaacctccggtttttttaggttgggttatcgcgca

SEQ ID NO: 1624 - DNA, 46 bp, synthetic construct
  misc_feature 1..46: note = artificial DNA sequence
  source 1..46: mol_type = other DNA
tccgtgagcattaattgcgttgcgggtcacgccgggttacctgcag

SEQ ID NO: 1625 - DNA, 46 bp, synthetic construct
  misc_feature 1..46: note = artificial DNA sequence
  source 1..46: mol_type = other DNA
attaggcaggtcagacgattggccaaagccagatagcccccgtcga

SEQ ID NO: 1626 - DNA, 43 bp, synthetic construct
  misc_feature 1..43: note = artificial DNA sequence
  source 1..43: mol_type = other DNA
tatgagccgctcactgtcactgcgcagcacgcgcaacagctga

SEQ ID NO: 1627 - DNA, 43 bp, synthetic construct
  misc_feature 1..43: note = artificial DNA sequence
  source 1..43: mol_type = other DNA
atcattaccgataactcatcgagtttttacaagcatataacta

SEQ ID NO: 1628 - DNA, 46 bp, synthetic construct
  misc_feature 1..46: note = artificial DNA sequence
  source 1..46: mol_type = other DNA
taacggattcagatgatgtatcacgaaccgcccacaaacgccgcca

SEQ ID NO: 1629 - DNA, 43 bp, synthetic construct
  misc_feature 1..43: note = artificial DNA sequence
  source 1..43: mol_type = other DNA
gtcaccagagccgccaccatttttaaccaccaccagagccgcc

SEQ ID NO: 1630 - DNA, 43 bp, synthetic construct
  misc_feature 1..43: note = artificial DNA sequence
  source 1..43: mol_type = other DNA
agaacgcgcaatcaataatcggctgaacctccttcatcgtagg

SEQ ID NO: 1631 - DNA, 38 bp, synthetic construct
  misc_feature 1..38: note = artificial DNA sequence
  source 1..38: mol_type = other DNA
cgacttagtaccgcaataaagaaattgattcgacttgc

SEQ ID NO: 1632 - DNA, 43 bp, synthetic construct
  misc_feature 1..43: note = artificial DNA sequence
  source 1..43: mol_type = other DNA
ccaagtttttaacgggtattaattctaagtttttacgcgaggc

SEQ ID NO: 1633 - DNA, 47 bp, synthetic construct
  misc_feature 1..47: note = artificial DNA sequence
  source 1..47: mol_type = other DNA
tgcggctggtaatgggaattcgtaggccagaatgcgtttgagggttg

SEQ ID NO: 1634 - DNA, 47 bp, synthetic construct
  misc_feature 1..47: note = artificial DNA sequence
  source 1..47: mol_type = other DNA
cctcagagactggattatacttctttttgttatcccaatacaaaata

SEQ ID NO: 1635 - DNA, 40 bp, synthetic construct
  misc_feature 1..40: note = artificial DNA sequence
  source 1..40: mol_type = other DNA
cgttcctggtaatatcatacctaccctcgttaagggcgcg

SEQ ID NO: 1636 - DNA, 48 bp, synthetic construct
  misc_feature 1..48: note = artificial DNA sequence
  source 1..48: mol_type = other DNA
acatcgggtacactggtctttgctcgtcataaaaagaagaagataagt

SEQ ID NO: 1637 - DNA, 40 bp, synthetic construct
  misc_feature 1..40: note = artificial DNA sequence
  source 1..40: mol_type = other DNA
gccaccaccctcatcaatagaaaatttttttatatggttt

SEQ ID NO: 1638 - DNA, 42 bp, synthetic construct
  misc_feature 1..42: note = artificial DNA sequence
  source 1..42: mol_type = other DNA
ggaagggcgatcggtgcgggcctctttttttgctattacgcc

SEQ ID NO: 1639 - DNA, 35 bp, synthetic construct
  misc_feature 1..35: note = artificial DNA sequence
  source 1..35: mol_type = other DNA
aatggaaactaattctgtccagatttttgacgaca

SEQ ID NO: 1640 - DNA, 47 bp, synthetic construct
  misc_feature 1..47: note = artificial DNA sequence
  source 1..47: mol_type = other DNA
gagagaataacataaaagctggcgatataatttttaagaaacgcaaa

SEQ ID NO: 1641 - DNA, 39 bp, synthetic construct
  misc_feature 1..39: note = artificial DNA sequence
  source 1..39: mol_type = other DNA
ttacatttaacaatttcatttgaatttttttcctttttt

SEQ ID NO: 1642 - DNA, 42 bp, synthetic construct
  misc_feature 1..42: note = artificial DNA sequence
  source 1..42: mol_type = other DNA
gcgcagtgcccgcttttgagacgggtgcctgtccgggtccac

SEQ ID NO: 1643 - DNA, 47 bp, synthetic construct
  misc_feature 1..47: note = artificial DNA sequence
  source 1..47: mol_type = other DNA
tgtgttcagcaaatctaacagtgtgtttttattgcagtaagcgtcat

SEQ ID NO: 1644 - DNA, 34 bp, synthetic construct
  misc_feature 1..34: note = artificial DNA sequence
  source 1..34: mol_type = other DNA
agtttattttttttgtcacaaggcgattaagaac

SEQ ID NO: 1645 - DNA, 48 bp, synthetic construct
  misc_feature 1..48: note = artificial DNA sequence
  source 1..48: mol_type = other DNA
cagaacaaacggtacggaggccaccactctgtcatcagattgttgccc

SEQ ID NO: 1646 - DNA, 47 bp, synthetic construct
  misc_feature 1..47: note = artificial DNA sequence
  source 1..47: mol_type = other DNA
tagaagaactcaaacctttgattaaattaaccgttgtaggttaacgg

SEQ ID NO: 1647 - DNA, 47 bp, synthetic construct
  misc_feature 1..47: note = artificial DNA sequence
  source 1..47: mol_type = other DNA
tcctcattttgatattaccctcagaaccagcaccatatctaacagta

SEQ ID NO: 1648 - DNA, 48 bp, synthetic construct
  misc_feature 1..48: note = artificial DNA sequence
  source 1..48: mol_type = other DNA
aagccgtttttcgtagattttcaggtagaaaccctgtttatcaacaat

SEQ ID NO: 1649 - DNA, 48 bp, synthetic construct
  misc_feature 1..48: note = artificial DNA sequence
  source 1..48: mol_type = other DNA
ttattcatcaaacatcaagaaaacaaaattaagctaatgcgttacaaa

SEQ ID NO: 1650 - DNA, 48 bp, synthetic construct
  misc_feature 1..48: note = artificial DNA sequence
  source 1..48: mol_type = other DNA
ataaaggtggcttgggtaacgccacctttacagggaggttttgaagcc

SEQ ID NO: 1651 - DNA, 48 bp, synthetic construct
  misc_feature 1..48: note = artificial DNA sequence
  source 1..48: mol_type = other DNA
cccgtatagggtcagtgccttgagcaatactttatcggcctaatcagt

SEQ ID NO: 1652 - DNA, 40 bp, synthetic construct
  misc_feature 1..40: note = artificial DNA sequence
  source 1..40: mol_type = other DNA
aacagggaagcgcattttttagacgggagaattaactgaa

SEQ ID NO: 1653 - DNA, 38 bp, synthetic construct
  misc_feature 1..38: note = artificial DNA sequence
  source 1..38: mol_type = other DNA
gctggtagggcgaaaaaccgtcgcgccatgaaggagcg

SEQ ID NO: 1654 - DNA, 40 bp, synthetic construct
  misc_feature 1..40: note = artificial DNA sequence
  source 1..40: mol_type = other DNA
ctccctcagacatagcccccttattttttagcgtttgcca

SEQ ID NO: 1655 - DNA, 40 bp, synthetic construct
  misc_feature 1..40: note = artificial DNA sequence
  source 1..40: mol_type = other DNA
ggaataggatatacagaaaattattattattttaacgtca

SEQ ID NO: 1656 - DNA, 40 bp, synthetic construct
  misc_feature 1..40: note = artificial DNA sequence
  source 1..40: mol_type = other DNA
tacaattttatcctgaatcttacctgccagttccaaataa

SEQ ID NO: 1657 - DNA, 40 bp, synthetic construct
  misc_feature 1..40: note = artificial DNA sequence
  source 1..40: mol_type = other DNA
cgatggccttttggggtcgaggtgtcttcgcggtttctgc

SEQ ID NO: 1658 - DNA, 40 bp, synthetic construct
  misc_feature 1..40: note = artificial DNA sequence
  source 1..40: mol_type = other DNA
acgagcatgtttaacgtcgcctgatgctcagtttcggaac

SEQ ID NO: 1659 - DNA, 40 bp, synthetic construct; identical to SEQ ID NO: 855
  misc_feature 1..40: note = artificial DNA sequence
  source 1..40: mol_type = other DNA

SEQ ID NO: 1660 - DNA, 31 bp, synthetic construct
  misc_feature 1..31: note = artificial DNA sequence
  source 1..31: mol_type = other DNA
gcaattcatcaatatagcggaatttgctttg

SEQ ID NO: 1661 - DNA, 40 bp, synthetic construct
  misc_feature 1..40: note = artificial DNA sequence
  source 1..40: mol_type = other DNA
atcggcatctattattctgaaacagaggcgaaaataccaa

SEQ ID NO: 1662 - DNA, 55 bp, synthetic construct
  misc_feature 1..55: note = artificial DNA sequence
  source 1..55: mol_type = other DNA
aacggatagaaacgattgaataatggaaccctactatggtatcatcaagaaacca

SEQ ID NO: 1663 - DNA, 55 bp, synthetic construct
  misc_feature 1..55: note = artificial DNA sequence
  source 1..55: mol_type = other DNA
ccgtaacacaagcccaataggaaaatcctgattgttgttgtggagccgccacggg

SEQ ID NO: 1664 - DNA, 39 bp, synthetic construct
  misc_feature 1..39: note = artificial DNA sequence
  source 1..39: mol_type = other DNA
ggatcccccctgcgggccgttttctgagaagcgtgcttt

SEQ ID NO: 1665 - DNA, 40 bp, synthetic construct
  misc_feature 1..40: note = artificial DNA sequence
  source 1..40: mol_type = other DNA
gttttagcgtctttccttatcattataaacaacatgttca

SEQ ID NO: 1666 - DNA, 39 bp, synthetic construct
  misc_feature 1..39: note = artificial DNA sequence
  source 1..39: mol_type = other DNA
ccgatttaagatgatgggaaacaatcggcgaaacgtaca

SEQ ID NO: 1667 - DNA, 48 bp, synthetic construct
  misc_feature 1..48: note = artificial DNA sequence
  source 1..48: mol_type = other DNA
aaaacagacaccctcacgtactcaggaggtttcggggtttttgctttg

SEQ ID NO: 1668 - DNA, 54 bp, synthetic construct
  misc_feature 1..54: note = artificial DNA sequence
  source 1..54: mol_type = other DNA
tgatgaaattcaattacctgagcactgcctataccaggcgtacaggaaaataaa

SEQ ID NO: 1669 - DNA, 39 bp, synthetic construct
  misc_feature 1..39: note = artificial DNA sequence
  source 1..39: mol_type = other DNA
tttcggtgtgtactggtaataagtttgatgagataagtg

SEQ ID NO: 1670 - DNA, 40 bp, synthetic construct
  misc_feature 1..40: note = artificial DNA sequence
  source 1..40: mol_type = other DNA
gaagcataaagtgtaattgttatccgagctcgtaaaggtt

SEQ ID NO: 1671 - DNA, 39 bp, synthetic construct
  misc_feature 1..39: note = artificial DNA sequence
  source 1..39: mol_type = other DNA
acatggctttttaacgaacagttaatgccccacatccct

SEQ ID NO: 1672 - DNA, 49 bp, synthetic construct
  misc_feature 1..49: note = artificial DNA sequence
  source 1..49: mol_type = other DNA
tgacaggaggttgttgacgctcaacggaacaatattcctgatttggcaa

SEQ ID NO: 1673 - DNA, 40 bp, synthetic construct
  misc_feature 1..40: note = artificial DNA sequence
  source 1..40: mol_type = other DNA
aaagggggatgtgctgtgccaagcaatagcaggggttttc

SEQ ID NO: 1674 - DNA, 39 bp, synthetic construct
  misc_feature 1..39: note = artificial DNA sequence
  source 1..39: mol_type = other DNA
gaggggttagaacctacgtataaatataagtgaatttac

SEQ ID NO: 1675 - DNA, 31 bp, synthetic construct
  misc_feature 1..31: note = artificial DNA sequence
  source 1..31: mol_type = other DNA
attaggattaggagccatttttttgggaatt

SEQ ID NO: 1676 - DNA, 47 bp, synthetic construct
  misc_feature 1..47: note = artificial DNA sequence
  source 1..47: mol_type = other DNA
gtaaagttacatcctcatatgaccaactttgatttttgcgcgtttta

SEQ ID NO: 1677 - DNA, 52 bp, synthetic construct
  misc_feature 1..52: note = artificial DNA sequence
  source 1..52: mol_type = other DNA
gaaccctttacattggcagattttaaaagcctttgcccgaacgtcagcggat

SEQ ID NO: 1678 - DNA, 50 bp, synthetic construct
  misc_feature 1..50: note = artificial DNA sequence
  source 1..50: mol_type = other DNA
gtcattgcaggcgctttctttttcactcaatccgccgggcgcggttgcgg

SEQ ID NO: 1679 - DNA, 50 bp, synthetic construct
  misc_feature 1..50: note = artificial DNA sequence
  source 1..50: mol_type = other DNA
cttataaactgattgcaaaaaaataacaattcgacaaaccaccacacccg

SEQ ID NO: 1680 - DNA, 30 bp, synthetic construct
  misc_feature 1..30: note = artificial DNA sequence
  source 1..30: mol_type = other DNA
caactaatccattgccattaaaaatcctga

SEQ ID NO: 1681 - DNA, 49 bp, synthetic construct
  misc_feature 1..49: note = artificial DNA sequence
  source 1..49: mol_type = other DNA
ccgaacacgattgaggacctgcaacgtgaggcggtcagtatagtacggt

SEQ ID NO: 1682 - DNA, 48 bp, synthetic construct
  misc_feature 1..48: note = artificial DNA sequence
  source 1..48: mol_type = other DNA
aaaagccgcacaggcggccttcaataagaggatcgcgtctaataggaa

SEQ ID NO: 1683 - DNA, 31 bp, synthetic construct
  misc_feature 1..31: note = artificial DNA sequence
  source 1..31: mol_type = other DNA
cagcgtggtggtcagtcaaatgaagaacgaa

SEQ ID NO: 1684 - DNA, 48 bp, synthetic construct
  misc_feature 1..48: note = artificial DNA sequence
  source 1..48: mol_type = other DNA
gaaagaggcggacttgtagaacgtagcctccgagcactaaacatttga

SEQ ID NO: 1685 - DNA, 47 bp, synthetic construct
  misc_feature 1..47: note = artificial DNA sequence
  source 1..47: mol_type = other DNA
ctttacacccgtaaacaaacttaaaaagagacgcagaaagctttcat

SEQ ID NO: 1686 - DNA, 46 bp, synthetic construct
  misc_feature 1..46: note = artificial DNA sequence
  source 1..46: mol_type = other DNA
ctggaggtgtccagcatcagcgggatgaatcgagcaaccgtcagac

SEQ ID NO: 1687 - DNA, 32 bp, synthetic construct
  misc_feature 1..32: note = artificial DNA sequence
  source 1..32: mol_type = other DNA
ccaccagcagaagataagccctaacaacagtt

SEQ ID NO: 1688 - DNA, 48 bp, synthetic construct
  misc_feature 1..48: note = artificial DNA sequence
  source 1..48: mol_type = other DNA
tggtgaagggatagctttccagttatcgacatcgttccggtagataat

SEQ ID NO: 1689 - DNA, 48 bp, synthetic construct
  misc_feature 1..48: note = artificial DNA sequence
  source 1..48: mol_type = other DNA
caacattaggccttcctgtagccaaaaataatagcccgaaacacgacc

SEQ ID NO: 1690 - DNA, 46 bp, synthetic construct
  misc_feature 1..46: note = artificial DNA sequence
  source 1..46: mol_type = other DNA
agaaaggaaggcggttgtgtactggaacaagaaatcggcaaaatcc

SEQ ID NO: 1691 - DNA, 46 bp, synthetic construct
  misc_feature 1..46: note = artificial DNA sequence
  source 1..46: mol_type = other DNA
gaataaaagggacattctggccaaaagaatactaaaatagaaagga

SEQ ID NO: 1692 - DNA, 48 bp, synthetic construct
  misc_feature 1..48: note = artificial DNA sequence
  source 1..48: mol_type = other DNA
tgaatggctattagaccattagatcgcgagctattcgagcaaaaagat

SEQ ID NO: 1693 - DNA, 32 bp, synthetic construct
  misc_feature 1..32: note = artificial DNA sequence
  source 1..32: mol_type = other DNA
agatttagtagagcttaagaggtcaaagagga

SEQ ID NO: 1694 - DNA, 33 bp, synthetic construct
  misc_feature 1..33: note = artificial DNA sequence
  source 1..33: mol_type = other DNA
caagcgcgtaaagctcaacatgttgtttcattc

SEQ ID NO: 1695 - DNA, 48 bp, synthetic construct
  misc_feature 1..48: note = artificial DNA sequence
  source 1..48: mol_type = other DNA
tattactttttgccagagattagatcaatatctgctggtcagcaccgt

SEQ ID NO: 1696 - DNA, 34 bp, synthetic construct
  misc_feature 1..34: note = artificial DNA sequence
  source 1..34: mol_type = other DNA
tgcccttcaccgcttttttcgtctcgtcgctggc

SEQ ID NO: 1697 - DNA, 34 bp, synthetic construct
  misc_feature 1..34: note = artificial DNA sequence
  source 1..34: mol_type = other DNA
gatccagccggtgctttttccctgcacaagaatg

SEQ ID NO: 1698 - DNA, 48 bp, synthetic construct
  misc_feature 1..48: note = artificial DNA sequence
  source 1..48: mol_type = other DNA
aattgctgcagacggtcccccagctaaacgggtaaaatacgtaatgcc

SEQ ID NO: 1699 - DNA, 34 bp, synthetic construct; identical to SEQ ID NO: 917
  misc_feature 1..34: note = artificial DNA sequence
  source 1..34: mol_type = other DNA

SEQ ID NO: 1700 - DNA, 47 bp, synthetic construct
  misc_feature 1..47: note = artificial DNA sequence
  source 1..47: mol_type = other DNA
aacatcgctctgacctgaaagcgtcagagataggatttagaagtctt

SEQ ID NO: 1701 - DNA, 47 bp, synthetic construct
  misc_feature 1..47: note = artificial DNA sequence
  source 1..47: mol_type = other DNA
tttgtctttaatgcgcgaactgataaacagagagtgccacgctgaga

SEQ ID NO: 1702 - DNA, 44 bp, synthetic construct
  misc_feature 1..44: note = artificial DNA sequence
  source 1..44: mol_type = other DNA
aagaagtaaacagtaatgtgagcgagtaacaacccgtcataacc

SEQ ID NO: 1703 - DNA, 35 bp, synthetic construct
  misc_feature 1..35: note = artificial DNA sequence
  source 1..35: mol_type = other DNA
tttgagtaacattatttttcattttgtcgtctgaa

SEQ ID NO: 1704 - DNA, 39 bp, synthetic construct
  misc_feature 1..39: note = artificial DNA sequence
  source 1..39: mol_type = other DNA
actacgaatacactaaaacactctaacaccgggatggct

SEQ ID NO: 1705 - DNA, 47 bp, synthetic construct
  misc_feature 1..47: note = artificial DNA sequence
  source 1..47: mol_type = other DNA
gacacgaactaacgggtaagagcaacactatcggattctcattgaat

SEQ ID NO: 1706 - DNA, 47 bp, synthetic construct
  misc_feature 1..47: note = artificial DNA sequence
  source 1..47: mol_type = other DNA
gtgtagcggtttttcacgctgcgccgccagcagttggggtttctccg

SEQ ID NO: 1707 - DNA, 36 bp, synthetic construct
  misc_feature 1..36: note = artificial DNA sequence
  source 1..36: mol_type = other DNA
ccgtgggaacaaagcataaacaacattattacaggt

SEQ ID NO: 1708 - DNA, 43 bp, synthetic construct
  misc_feature 1..43: note = artificial DNA sequence
  source 1..43: mol_type = other DNA
ttgtgagaacgtggactttttccaacgtcaattgccccagcag

SEQ ID NO: 1709 - DNA, 38 bp, synthetic construct
  misc_feature 1..38: note = artificial DNA sequence
  source 1..38: mol_type = other DNA
aaatctaaagcatcaccttgttttttgaacccagcggt

SEQ ID NO: 1710 - DNA, 39 bp, synthetic construct
  misc_feature 1..39: note = artificial DNA sequence
  source 1..39: mol_type = other DNA
aaacaaagatgttactcccaaatcattttaacgcatagg

SEQ ID NO: 1711 - DNA, 39 bp, synthetic construct
  misc_feature 1..39: note = artificial DNA sequence
  source 1..39: mol_type = other DNA
agaggcttttgtagtgatgaaggcaaatatcaggttatc

SEQ ID NO: 1712 - DNA, 45 bp, synthetic construct
  misc_feature 1..45: note = artificial DNA sequence
  source 1..45: mol_type = other DNA
gccctgagtttttgagttgcagcaagctaagccggcgaacgtggc

SEQ ID NO: 1713 - DNA, 37 bp, synthetic construct
  misc_feature 1..37: note = artificial DNA sequence
  source 1..37: mol_type = other DNA
ccagtcgggaaacctgttttttgtgccagctgcatta

SEQ ID NO: 1714 - DNA, 38 bp, synthetic construct
  misc_feature 1..38: note = artificial DNA sequence
  source 1..38: mol_type = other DNA
ttaaatatgcaactaaatctttgacaatcataagggaa

SEQ ID NO: 1715 - DNA, 44 bp, synthetic construct
  misc_feature 1..44: note = artificial DNA sequence
  source 1..44: mol_type = other DNA
cgattaatttttgggatttttaaacatttttgaggcgccgtcaa

SEQ ID NO: 1716 - DNA, 40 bp, synthetic construct
  misc_feature 1..40: note = artificial DNA sequence
  source 1..40: mol_type = other DNA
tagccggaagaccagggaactggcctacgttaataaagat

SEQ ID NO: 1717 - DNA, 44 bp, synthetic construct
  misc_feature 1..44: note = artificial DNA sequence
  source 1..44: mol_type = other DNA
cattgtgaattaccttatgcgaacgtaacaaagctgctttgagg

SEQ ID NO: 1718 - DNA, 40 bp, synthetic construct
  misc_feature 1..40: note = artificial DNA sequence
  source 1..40: mol_type = other DNA
agggggtaaaaaaccagaaccagaaattgctccttttgat

SEQ ID NO: 1719 - DNA, 39 bp, synthetic construct
  misc_feature 1..39: note = artificial DNA sequence
  source 1..39: mol_type = other DNA
tacaacggactaaagactttttcatgaggaaattcatta

SEQ ID NO: 1720 - DNA, 42 bp, synthetic construct
  misc_feature 1..42: note = artificial DNA sequence
  source 1..42: mol_type = other DNA
cgaaaatcctgcgccagggtggtttttttttcttttcaccag

SEQ ID NO: 1721 - DNA, 42 bp, synthetic construct
  misc_feature 1..42: note = artificial DNA sequence
  source 1..42: mol_type = other DNA
cgcctgtgcgagtaaaagagtaaatattttttaaaccctcaa

SEQ ID NO: 1722 - DNA, 40 bp, synthetic construct
  misc_feature 1..40: note = artificial DNA sequence
  source 1..40: mol_type = other DNA
gaacgtgccaaaagaaggcaccaacctaaaaccgcaacca

SEQ ID NO: 1723 - DNA, 40 bp, synthetic construct
  misc_feature 1..40: note = artificial DNA sequence
  source 1..40: mol_type = other DNA
gcttacggcggtggtgccatcccagccagcagtggcaaat

SEQ ID NO: 1724 - DNA, 40 bp, synthetic construct
  misc_feature 1..40: note = artificial DNA sequence
  source 1..40: mol_type = other DNA
caaacgcggtccgctggtggttccgagtccactattaaag

SEQ ID NO: 1725 - DNA, 39 bp, synthetic construct
  misc_feature 1..39: note = artificial DNA sequence
  source 1..39: mol_type = other DNA
agatagacaagaatttttagcgatttaccagtcccggaa

SEQ ID NO: 1726 - DNA, 40 bp, synthetic construct
  misc_feature 1..40: note = artificial DNA sequence
  source 1..40: mol_type = other DNA
ctcctgtccatcacgcagtaataacatttttcacttgacc

SEQ ID NO: 1727 - DNA, 29 bp, synthetic construct
  misc_feature 1..29: note = artificial DNA sequence
  source 1..29: mol_type = other DNA
gattgtatcgtttgctaaacaactttcaa

SEQ ID NO: 1728 - DNA, 39 bp, synthetic construct
  misc_feature 1..39: note = artificial DNA sequence
  source 1..39: mol_type = other DNA
gggtgagaaaggccgatagcgatttaaacagcttgatac

SEQ ID NO: 1729 - DNA, 40 bp, synthetic construct
  misc_feature 1..40: note = artificial DNA sequence
  source 1..40: mol_type = other DNA
tccacagaccgattgaatacaggcaaggcaccaccctcag

SEQ ID NO: 1730 - DNA, 49 bp, synthetic construct
  misc_feature 1..49: note = artificial DNA sequence
  source 1..49: mol_type = other DNA
agagggtagcagtatgtaacggaaaggtgaatcaaaatcaccggaaccg

SEQ ID NO: 1731 - DNA, 39 bp, synthetic construct
  misc_feature 1..39: note = artificial DNA sequence
  source 1..39: mol_type = other DNA
tttttagaaccctcatatattttaagcctttattgcctg

SEQ ID NO: 1732 - DNA, 49 bp, synthetic construct
  misc_feature 1..49: note = artificial DNA sequence
  source 1..49: mol_type = other DNA
aggtcaggaaaggctctttcacgttgaaaatcgcgtccaatactctgcc

SEQ ID NO: 1733 - DNA, 39 bp, synthetic construct
  misc_feature 1..39: note = artificial DNA sequence
  source 1..39: mol_type = other DNA
tcataggtgaccaccgtaatcagtactgtagcgcgtttt

SEQ ID NO: 1734 - DNA, 54 bp, synthetic construct
  misc_feature 1..54: note = artificial DNA sequence
  source 1..54: mol_type = other DNA
tgagatttttgagatgtcaggacgttgtgtcgaaatccgtttttgacctgctcc

SEQ ID NO: 1735 - DNA, 49 bp, synthetic construct
  misc_feature 1..49: note = artificial DNA sequence
  source 1..49: mol_type = other DNA
agtaaaaggtggcatcaattctttttactaatagtattagctatatttt

SEQ ID NO: 1736 - DNA, 48 bp, synthetic construct
  misc_feature 1..48: note = artificial DNA sequence
  source 1..48: mol_type = other DNA
tcttttcaagcgtcagagcgacagaatcaagtgagtcaatactttttc

SEQ ID NO: 1737 - DNA, 40 bp, synthetic construct
  misc_feature 1..40: note = artificial DNA sequence
  source 1..40: mol_type = other DNA
taagcaaatatttaccctgactattgtaccccaataattt

SEQ ID NO: 1738 - DNA, 40 bp, synthetic construct
  misc_feature 1..40: note = artificial DNA sequence
  source 1..40: mol_type = other DNA
caaaaggagcctttaacgatagttcaaaggctcaaatcac

SEQ ID NO: 1739 - DNA, 31 bp, synthetic construct
  misc_feature 1..31: note = artificial DNA sequence
  source 1..31: mol_type = other DNA
tcaggtctcgtaaccgtgcatgcggtgtaga

SEQ ID NO: 1740 - DNA, 48 bp, synthetic construct
  misc_feature 1..48: note = artificial DNA sequence
  source 1..48: mol_type = other DNA
ttttaaggggagcaaaattcaaaatgcctgagtaatgtgtttgccttt

SEQ ID NO: 1741 - DNA, 48 bp, synthetic construct
  misc_feature 1..48: note = artificial DNA sequence
  source 1..48: mol_type = other DNA
atgtaaatgctgatgcctacctttaatcaatatatgtgagtgaataac

SEQ ID NO: 1742 - DNA, 49 bp, synthetic construct
  misc_feature 1..49: note = artificial DNA sequence
  source 1..49: mol_type = other DNA
tcattattttttaccaggtttaattccctgacgagaaacacagcgaaag

SEQ ID NO: 1743 - DNA, 40 bp, synthetic construct
  misc_feature 1..40: note = artificial DNA sequence
  source 1..40: mol_type = other DNA
taatcaaaaacgtcacaccattacttctgaccagaactgg

SEQ ID NO: 1744 - DNA, 48 bp, synthetic construct
  misc_feature 1..48: note = artificial DNA sequence
  source 1..48: mol_type = other DNA
agaaggcttatccggtaaccaagtaccgcaatccgacaaaaggtaaag

SEQ ID NO: 1745 - DNA, 32 bp, synthetic construct
  misc_feature 1..32: note = artificial DNA sequence
  source 1..32: mol_type = other DNA
tgaaagtttttattaagaggctgactgagaga

SEQ ID NO: 1746 - DNA, 39 bp, synthetic construct
  misc_feature 1..39: note = artificial DNA sequence
  source 1..39: mol_type = other DNA
cagatatcaccctgaacaaagtcaactgttggacaccac

SEQ ID NO: 1747 - DNA, 48 bp, synthetic construct
  misc_feature 1..48: note = artificial DNA sequence
  source 1..48: mol_type = other DNA
aaaacattatgacaccggaaccagccctcagaggaaattaaaagggcg

SEQ ID NO: 1748 - DNA, 32 bp, synthetic construct
  misc_feature 1..32: note = artificial DNA sequence
  source 1..32: mol_type = other DNA
tgggcgcaccagccagctttccggtcaggaag

SEQ ID NO: 1749 - DNA, 40 bp, synthetic construct
  misc_feature 1..40: note = artificial DNA sequence
  source 1..40: mol_type = other DNA
cattagcaatattgacgccaaagaattagcaaaattaagc

SEQ ID NO: 1750 - DNA, 40 bp, synthetic construct
  misc_feature 1..40: note = artificial DNA sequence
  source 1..40: mol_type = other DNA
aggccggaatccctgtaatacttttgcgggagaaatgcaa

SEQ ID NO: 1751 - DNA, 40 bp, synthetic construct
  misc_feature 1..40: note = artificial DNA sequence
  source 1..40: mol_type = other DNA
acggtaatgtttatcaggaacaactaaaggaacgacagta

SEQ ID NO: 1752 - DNA, 40 bp, synthetic construct
  misc_feature 1..40: note = artificial DNA sequence
  source 1..40: mol_type = other DNA
ctgataaagcccacgcaaccgttctagctttttgataaat

SEQ ID NO: 1753 - DNA, 33 bp, synthetic construct
  misc_feature 1..33: note = artificial DNA sequence
  source 1..33: mol_type = other DNA
cagtttgatacattcaacagccctcacaacgcc

SEQ ID NO: 1754 - DNA, 39 bp, synthetic construct
  misc_feature 1..39: note = artificial DNA sequence
  source 1..39: mol_type = other DNA
caaagacattcattaatacccaaataaatttacggaatc

SEQ ID NO: 1755 - DNA, 48 bp, synthetic construct
  misc_feature 1..48: note = artificial DNA sequence
  source 1..48: mol_type = other DNA
gagacagtatcaggtcatttcaaccataaagctaaatcggaataaagc

SEQ ID NO: 1756 - DNA, 38 bp, synthetic construct
  misc_feature 1..38: note = artificial DNA sequence
  source 1..38: mol_type = other DNA
taacatcctaaattttttaatattttgttaaattctgt

SEQ ID NO: 1757 - DNA, 40 bp, synthetic construct
  misc_feature 1..40: note = artificial DNA sequence
  source 1..40: mol_type = other DNA
ttgaaaacgggagttaaaggccgcgtcgctgaggcttgca

SEQ ID NO: 1758 - DNA, 36 bp, synthetic construct
  misc_feature 1..36: note = artificial DNA sequence
  source 1..36: mol_type = other DNA
tgttaaatcagctcattttttttttaacctcagaaa

SEQ ID NO: 1759 - DNA, 34 bp, synthetic construct
  misc_feature 1..34: note = artificial DNA sequence
  source 1..34: mol_type = other DNA
gaaagataaaagtttttgaattacgagcggcgga

SEQ ID NO: 1760 - DNA, 40 bp, synthetic construct
  misc_feature 1..40: note = artificial DNA sequence
  source 1..40: mol_type = other DNA
tacaaactatagttagcgtaacgatctaaataaccagcgc

SEQ ID NO: 1761 - DNA, 47 bp, synthetic construct
  misc_feature 1..47: note = artificial DNA sequence
  source 1..47: mol_type = other DNA
ggctacagaggctcattcattttttgaataaggcttgtcaactttaa

SEQ ID NO: 1762 - DNA, 41 bp, synthetic construct
  misc_feature 1..41: note = artificial DNA sequence
  source 1..41: mol_type = other DNA
aaatccaaataaagtaaaggcgttaaataagacaagcaaat

SEQ ID NO: 1763 - DNA, 41 bp, synthetic construct
  misc_feature 1..41: note = artificial DNA sequence
  source 1..41: mol_type = other DNA
tgaccgtaatgggataggcagatacataacgcctcatcagt

SEQ ID NO: 1764 - DNA, 48 bp, synthetic construct
  misc_feature 1..48: note = artificial DNA sequence
  source 1..48: mol_type = other DNA
atttggggacatttcgcaattttttggtcaatcaatcatagagatcta

SEQ ID NO: 1765 - DNA, 34 bp, synthetic construct
  misc_feature 1..34: note = artificial DNA sequence
  source 1..34: mol_type = other DNA
caaagaacccatcgatagcagtcctcaagagaag

SEQ ID NO: 1766 - DNA, 45 bp, synthetic construct
  misc_feature 1..45: note = artificial DNA sequence
  source 1..45: mol_type = other DNA
gcaaggataagattcccatttttttctgcgaacgagtgtctggaa

SEQ ID NO: 1767 - DNA, 46 bp, synthetic construct
  misc_feature 1..46: note = artificial DNA sequence
  source 1..46: mol_type = other DNA
agtttgaggggacgattgcgaatggttgatatagcatgtaacctgt

SEQ ID NO: 1768 - DNA, 47 bp, synthetic construct
  misc_feature 1..47: note = artificial DNA sequence
  source 1..47: mol_type = other DNA
accgtgtgcgcccaatagcaataattagcaaacgtagaaaatacata

SEQ ID NO: 1769 - DNA, 46 bp, synthetic construct
  misc_feature 1..46: note = artificial DNA sequence
  source 1..46: mol_type = other DNA
cctcagaaccgccaagccaccaccagtagccaatgaaagcgagaaa

SEQ ID NO: 1770 - DNA, 42 bp, synthetic construct
  misc_feature 1..42: note = artificial DNA sequence
  source 1..42: mol_type = other DNA
aatataatgctgttgccggatttttagggtagctatttttga

SEQ ID NO: 1771 - DNA, 47 bp, synthetic construct
  misc_feature 1..47: note = artificial DNA sequence
  source 1..47: mol_type = other DNA
agtgaattctgtaaatcgtcgctattaattaatatacaaaaaatata

SEQ ID NO: 1772 - DNA, 38 bp, synthetic construct
  misc_feature 1..38: note = artificial DNA sequence
  source 1..38: mol_type = other DNA
atataacagttaaacatcaatatgatattcataaccga

SEQ ID NO: 1773 - DNA, 46 bp, synthetic construct
  misc_feature 1..46: note = artificial DNA sequence
  source 1..46: mol_type = other DNA
ttgtaccatcgatgaagagtcttgaatttcagcttagatagaatcc

SEQ ID NO: 1774 - DNA, 46 bp, synthetic construct
  misc_feature 1..46: note = artificial DNA sequence
  source 1..46: mol_type = other DNA
ccggaatttttcaaactccaactatagtcatttttaagcaaagcgg

SEQ ID NO: 1775 - DNA, 44 bp, synthetic construct
  misc_feature 1..44: note = artificial DNA sequence
  source 1..44: mol_type = other DNA
aatgacaacaaccatctccaaaaaattagatttttagtaccttt

SEQ ID NO: 1776 - DNA, 46 bp, synthetic construct
  misc_feature 1..46: note = artificial DNA sequence
  source 1..46: mol_type = other DNA
atagtaaaatgtttagattttttggatattgggaagatttttaaat

SEQ ID NO: 1777 - DNA, 39 bp, synthetic construct
  misc_feature 1..39: note = artificial DNA sequence
  source 1..39: mol_type = other DNA
taagactcttccagacgccattcgccattcaggctgcgc

SEQ ID NO: 1778 - DNA, 44 bp, synthetic construct
  misc_feature 1..44: note = artificial DNA sequence
  source 1..44: mol_type = other DNA
aagagaattcgcaagaaaataccgagagccagtatcaccgtcac

SEQ ID NO: 1779 - DNA, 46 bp, synthetic construct
  misc_feature 1..46: note = artificial DNA sequence
  source 1..46: mol_type = other DNA
agccccaaaaacaggaatagaaagcttgctttcggttaatttcatc

SEQ ID NO: 1780 - DNA, 38 bp, synthetic construct
  misc_feature 1..38: note = artificial DNA sequence
  source 1..38: mol_type = other DNA
ttgtatcgcgtaaaacatcagaaactcagaggtagcat

SEQ ID NO: 1781 - DNA, 44 bp, synthetic construct
  misc_feature 1..44: note = artificial DNA sequence
  source 1..44: mol_type = other DNA
agatttttttgtatcatcgcacagcatcggaacgagggtagcaa

SEQ ID NO: 1782 - DNA, 47 bp, synthetic construct
  misc_feature 1..47: note = artificial DNA sequence
  source 1..47: mol_type = other DNA
agaaacaacctgaacaagaaataccgctcacaattccacacaaaact

SEQ ID NO: 1783 - DNA, 39 bp, synthetic construct
  misc_feature 1..39: note = artificial DNA sequence
  source 1..39: mol_type = other DNA
tttccatcctaatttttaaatcattgcacgtccagtcac

SEQ ID NO: 1784 - DNA, 49 bp, synthetic construct
  misc_feature 1..49: note = artificial DNA sequence
  source 1..49: mol_type = other DNA
gggaataatatcccatacgagccgaacagccaagattagttgctaagtt

SEQ ID NO: 1785 - DNA, 41 bp, synthetic construct
  misc_feature 1..41: note = artificial DNA sequence
  source 1..41: mol_type = other DNA
taatttttgcacccagcaaaatgaatttcagaggtaaaacg

SEQ ID NO: 1786 - DNA, 53 bp, synthetic construct
  misc_feature 1..53: note = artificial DNA sequence
  source 1..53: mol_type = other DNA
ttttactcacatagctgtttcctgtgtgaaaagcctgggcagttgacacccaa

SEQ ID NO: 1787 - DNA, 47 bp, synthetic construct
  misc_feature 1..47: note = artificial DNA sequence
  source 1..47: mol_type = other DNA
ggtgctgcatcatggtcctcctcagtgcctaatgagtgagctatcat

SEQ ID NO: 1788 - DNA, 44 bp, synthetic construct
  misc_feature 1..44: note = artificial DNA sequence
  source 1..44: mol_type = other DNA
tttgtttccagagcctaattaacgctaatgaaccatacctcacc

SEQ ID NO: 1789 - DNA, 51 bp, synthetic construct
  misc_feature 1..51: note = artificial DNA sequence
  source 1..51: mol_type = other DNA
ccagaatccacggtcacctaaaggatcaagttcactacgcgagcgtcttct

SEQ ID NO: 1790 - DNA, 35 bp, synthetic construct
  misc_feature 1..35: note = artificial DNA sequence
  source 1..35: mol_type = other DNA
ttcttgacaagaaccggatgtttccatgattatac

SEQ ID NO: 1791 - DNA, 43 bp, synthetic construct
  misc_feature 1..43: note = artificial DNA sequence
  source 1..43: mol_type = other DNA
attgcatcttcaaagcaaatagcgcagatgaaccttcatcaat

SEQ ID NO: 1792 - DNA, 33 bp, synthetic construct
  misc_feature 1..33: note = artificial DNA sequence
  source 1..33: mol_type = other DNA
ttaccagacctggctgacggtgtacacgaggcg

SEQ ID NO: 1793 - DNA, 32 bp, synthetic construct
  misc_feature 1..32: note = artificial DNA sequence
  source 1..32: mol_type = other DNA
acgagaatgaatgcttttttgccagctcacgt

SEQ ID NO: 1794 - DNA, 27 bp, synthetic construct
  misc_feature 1..27: note = artificial DNA sequence
  source 1..27: mol_type = other DNA
ccaacggctggtcagcgccaacgcgct

SEQ ID NO: 1795 - DNA, 27 bp, synthetic construct
  misc_feature 1..27: note = artificial DNA sequence
  source 1..27: mol_type = other DNA
taggcggtttgcgtattgggtttgatg

SEQ ID NO: 1796 - DNA, 35 bp, synthetic construct
  misc_feature 1..35: note = artificial DNA sequence
  source 1..35: mol_type = other DNA
tctttagggccagagcaaacgatgtcaaaagaatt

SEQ ID NO: 1797 - DNA, 35 bp, synthetic construct
  misc_feature 1..35: note = artificial DNA sequence
  source 1..35: mol_type = other DNA
tagatagggttgagtgttgctcacggaaatttctg

SEQ ID NO: 1798 - DNA, 42 bp, synthetic construct
  misc_feature 1..42: note = artificial DNA sequence
  source 1..42: mol_type = other DNA
tttttatcagagagataaaggaaacgataaacacatggtttg

SEQ ID NO: 1799 - DNA, 32 bp, synthetic construct
  misc_feature 1..32: note = artificial DNA sequence
  source 1..32: mol_type = other DNA
tttttgtaaattgggcaggaataccacttttt

SEQ ID NO: 1800 - DNA, 49 bp, synthetic construct
  misc_feature 1..49: note = artificial DNA sequence
  source 1..49: mol_type = other DNA
accagaagccgaagcaatgaaatagcaatagattgagcgctaatttttt

SEQ ID NO: 1801 - DNA, 41 bp, synthetic construct
  misc_feature 1..41: note = artificial DNA sequence
  source 1..41: mol_type = other DNA
tttcgagaacatgtaatttaggcttcttaccagtatttttt

SEQ ID NO: 1802 - DNA, 50 bp, synthetic construct
  misc_feature 1..50: note = artificial DNA sequence
  source 1..50: mol_type = other DNA
atgggatgcccaccgcttctggtgccggaaaccaagaaaagtaagttttt

SEQ ID NO: 1803 - DNA, 50 bp, synthetic construct
  misc_feature 1..50: note = artificial DNA sequence
  source 1..50: mol_type = other DNA
agaggcatataattacaacagtagaattgagttaagcccaataatttttt

SEQ ID NO: 1804 - DNA, 46 bp, synthetic construct
  misc_feature 1..46: note = artificial DNA sequence
  source 1..46: mol_type = other DNA
tttttattcaactaatgtcacgttggaatcgtcattttttaatatt

SEQ ID NO: 1805 - DNA, 41 bp, synthetic construct
  misc_feature 1..41: note = artificial DNA sequence
  source 1..41: mol_type = other DNA
tttttatttaacaacgccccagtaatcttgctttatcaaaa

SEQ ID NO: 1806 - DNA, 42 bp, synthetic construct
  misc_feature 1..42: note = artificial DNA sequence
  source 1..42: mol_type = other DNA
tttttaaagccaacgctctagaaaaagcctgtttagtttttt

SEQ ID NO: 1807 - DNA, 49 bp, synthetic construct
  misc_feature 1..49: note = artificial DNA sequence
  source 1..49: mol_type = other DNA
tttttaagagcaagaaaccctttttaggcaaagcgttagtaaatgaatt

SEQ ID NO: 1808 - DNA, 49 bp, synthetic construct
  misc_feature 1..49: note = artificial DNA sequence
  source 1..49: mol_type = other DNA
ctatcttagaaaccgcccacaagggcttaattgagaatcgccatttttt

SEQ ID NO: 1809 - DNA, 55 bp, synthetic construct
  misc_feature 1..55: note = artificial DNA sequence
  source 1..55: mol_type = other DNA
tttttcagatagccgaacaaagttcatcagcggagtgaggaaggtaacaagagaa

SEQ ID NO: 1810 - DNA, 47 bp, synthetic construct
  misc_feature 1..47: note = artificial DNA sequence
  source 1..47: mol_type = other DNA
tttttatcatatgcgtttttccctttaagacgctgagaaaggtaaag

SEQ ID NO: 1811 - DNA, 56 bp, synthetic construct
  misc_feature 1..56: note = artificial DNA sequence
  source 1..56: mol_type = other DNA
gcgccgactatattcgttttgcgggatcgtcaccctcagccagaacgagtattttt

SEQ ID NO: 1812 - DNA, 58 bp, synthetic construct
  misc_feature 1..58: note = artificial DNA sequence
  source 1..58: mol_type = other DNA
gcagtagagtaggtagagattaggcaccagaaggcccatgtagccagcatacggccac

SEQ ID NO: 1813 - DNA, 58 bp, synthetic construct
  misc_feature 1..58: note = artificial DNA sequence
  source 1..58: mol_type = other DNA
gcagtagagtaggtagagattaggcaacggccagcaattttcagggatagctgagttt

SEQ ID NO: 1814 - DNA, 50 bp, synthetic construct
  misc_feature 1..50: note = artificial DNA sequence
  source 1..50: mol_type = other DNA
gcagtagagtaggtagagattaggcaggcgctagggcgcatcgagcttga

SEQ ID NO: 1815 - DNA, 59 bp, synthetic construct
  misc_feature 1..59: note = artificial DNA sequence
  source 1..59: mol_type = other DNA
gcagtagagtaggtagagattaggcacgccatcatattaattcaccagtcagaattaga

SEQ ID NO: 1816 - DNA, 50 bp, synthetic construct
  misc_feature 1..50: note = artificial DNA sequence
  source 1..50: mol_type = other DNA
gcagtagagtaggtagagattaggcactcatttgcgtactcgtattaaat

SEQ ID NO: 1817 - DNA, 53 bp, synthetic construct
  misc_feature 1..53: note = artificial DNA sequence
  source 1..53: mol_type = other DNA
gcagtagagtaggtagagattaggcaccccctcaaccataattttttcaaaaa

SEQ ID NO: 1818 - DNA, 58 bp, synthetic construct
  misc_feature 1..58: note = artificial DNA sequence
  source 1..58: mol_type = other DNA
gcagtagagtaggtagagattaggcatgtagcatattcgcataataaatcgggaggaa

SEQ ID NO: 1819 - DNA, 49 bp, synthetic construct
  misc_feature 1..49: note = artificial DNA sequence
  source 1..49: mol_type = other DNA
gcagtagagtaggtagagattaggcaatcgcacttttaaattgtaaacg

SEQ ID NO: 1820 - DNA, 50 bp, synthetic construct
  misc_feature 1..50: note = artificial DNA sequence
  source 1..50: mol_type = other DNA
gcagtagagtaggtagagattaggcaggaagttttgtcgtctcttattac

SEQ ID NO: 1821 - DNA, 26 bp, synthetic construct
  misc_feature 1..26: note = artificial DNA sequence
  source 1..26: mol_type = other DNA
tgcctaatctctacctactctactgc

1. A DNA-based nanostructure,
wherein said DNA-based nanostructure is a shell comprises a cavity enclosed by said DNA-based nanostructure,
wherein said DNA-based nanostructure is formed by self-assembling DNA-based building blocks,
wherein each of said self-assembling DNA-based building blocks is formed by a single-stranded DNA template strand and a set of oligonucleotides complementary to said single-stranded DNA template,
wherein each of said oligonucleotides is either complementary to one contiguous DNA sequence stretch or to at least two non-contiguous DNA sequence stretches on said single-stranded DNA template,
wherein each of said self-assembling DNA-based building blocks is a triangular and/or a rectangular prismoid, particularly a triangular prismoid,
and wherein a subset of one or more of said oligonucleotides in one or more of said self-assembling DNA-based building blocks is/are each linked to a construct comprising at least one sulfonated or sulfated polysaccharide group pointing to the interior of said cavity, particularly a construct comprising one or two sulfonated or sulfated polysaccharide groups,
wherein each said construct comprises (i) a handle comprising at least one binding site for said sulfonated or sulfated polysaccharide group, and (ii) said sulfonated or sulfated polysaccharide group(s) bound to said handle; wherein said handle has a length corresponding to at least to the length of a single-stranded oligonucleotide comprising 30 nucleotides.

2. The DNA-based nanostructure according to claim 1, wherein each of said handles comprises two binding sites for said sulfonated or sulfated polysaccharide groups.

3. The DNA-based nanostructure according to claim 1, wherein each of said sulfonated or sulfated polysaccharide groups is independently selected from the group consisting of heparin, heparan sulfate, hybrid heparan sulfates, carrageenans, cellulose sulfate, and dextrin 2-sulfate.

4. The DNA-based nanostructure according to claim 3, wherein each of said sulfonated or sulfated polysaccharides is independently selected from a heparan sulfate and a hybrid heparan sulfate, in particular a heparan sulfate.

5. The DNA-based nanostructure according to claim 1, wherein one or more of said self-assembling DNA-based building blocks in said subset comprise n single-stranded oligonucleotides as said handles, wherein each handle is independently linked to at least one of said sulfonated or sulfated polysaccharide groups, wherein n is an integer independently selected from 1, 2, 3, 4, 5, 6, 7, 8, 9, 10, 11, and 12, particularly wherein n is 9.

6. The DNA-based nanostructure according to claim 1, wherein said handles are single-stranded oligonucleotides having a length of between 30 and 60 nucleotides, in particular between 40 and 55 nucleotides, more particularly between 45 and 50 nucleotides.

7. The DNA-based nanostructure according to claim 1, wherein each of said sulfonated or sulfated polysaccharide groups comprises an oligonucleotide having a sequence that is complementary to an oligonucleotide stretch comprised in said handles.

8. The DNA-based nanostructure of claim 1 comprising, a closed three-dimensional geometric shape, wherein the closed three-dimensional geometric shape is selected from the group consisting of: a sphere, a spherocylinder, a polyhedron, a tetrahedron, an octahedron and an icosahedron, wherein the DNA-based nanostructure is formed in situ from said self-assembling DNA-based building blocks in the presence of said viruses or viral particles to be encapsulated.

9. The DNA-based nanostructure of claim 1 comprising, a shell with an opening for accessing said cavity.

10. The DNA-based nanostructure of claim 1 comprising, a combination of a first and a second subshell, wherein each of said first and said second subshell comprises an opening to access a first and a second inner cavity, respectively, wherein said first and said second inner cavity together form said cavity, optionally wherein said first and said second subshell are connected by at least one linker.

11. The DNA-based nanostructure of claim 1 comprising, an icosahedral structure.

12. The DNA-based nanostructure of claim 11, wherein said DNA-based nanostructure is a DNA-based nanostructure formed by self-assembling DNA-based building blocks, wherein each of said self-assembling DNA-based building blocks is a triangular and/or a rectangular prismoid, optionally wherein each of said self-assembling DNA-based building blocks is a triangular prismoid.

13. The DNA-based nanostructure of claim 12,
wherein each said triangular and/or a rectangular prismoid is formed by m triangular, or rectangular, respectively, planes, wherein m is an integer independently selected from 4, 5, 6, 7 and 8, in particular independently selected from 5, 6 and 7, more particularly wherein said integer is 6, the three, or four, respectively, edges of each of said m planes are formed by n parallel stretches of DNA double helices, wherein n is an integer independently selected from 1, 2, 3, 4, 5 and 6 in particular independently selected from 2, 3, 4 and 5, more particularly independently selected from 3 and 4,
wherein each plane is connected to a plane above and/or a plane beyond said plane (i) by stacking interactions between the DNA double helices forming said planes, and (ii) partially by DNA stretches within said single-stranded DNA template and/or said oligonucleotides forming said DNA-based building block bridging at least two of said planes, and
wherein at least two of the three, or four, respectively, side trapezoids comprise a specific pattern of recesses and/or extrusions formed by missing or additional DNA double helical stretches for specific interaction with a complementary pattern on the side trapezoid of another one of said self-assembling DNA-based building blocks.

14. The DNA-based nanostructure of claim 1, wherein said DNA-based nanostructure is a half shell selected from the group consisting of:
(a) a half octahedron DNA-based nanostructure comprising T_octa self-assembling DNA-based building blocks, which consists of a set of four copies of a triangular frustum, wherein the base-pair stacking contacts on one of the triangular edges of the triangular frustum are inactivated by either strand shortening or by adding unpaired thymidines;
(b) a T=1 half shell comprising T1_pentamer_triangle self-assembling DNA-based building blocks, which consists of two sets of in each case five copies of two different triangular frusta, wherein the five copies of the first set form a closed pentamer, and the five copies of the second set dock onto the edges of said pentamer; and
(c) a “trap” T=1 half shell with a missing pentagon vertex comprising a combination of T1_pentamer_triangle and T1_ring_triangle self-assembling DNA-based building blocks, which consists of three sets of in each case five copies of three different triangular frusta, wherein the five copies of the first set form a closed pentamer, the five copies of the second set dock onto the edges of said pentamer the five copies of the second set dock onto the edges of said pentamer, and the five copies of the third set dock into the gaps between the five copies of said second set; and
(d) a T=3 icosahedral half shell comprising T3_6_triangle based self-assembling DNA-based building blocks, which consists of a total of 30 triangular subunits partitioned as five copies of six different full-size DNA triangle designs with specific edge docking rules.

15. The DNA-based nanostructure of claim 12, further comprising
(a) one or more types of DNA brick constructs, each type of such DNA brick constructs being characterized by one or more interaction sites for specific interaction by edge-to-edge stacking contacts with one or more complementary interaction sites present on the plane of a triangular or rectangular frustum on the outer surface of said DNA-based nanostructure, wherein said DNA brick constructs cover the free space between the three, or four, respectively, edges of said plane;
(b) one or more cross-linkages within one of said triangular or rectangular prismoids, and/or between two of said triangular and/or rectangular prismoids; and/or
(c) at least one moiety specifically interacting with said viruses or viral particles.

16. A composition comprising a DNA-based nanostructure according to claim 1 encapsulating one or more viruses or viral particles.

17. A method for encapsulating one or more viruses or viral particles, comprising the steps of: providing a DNA-based nanostructure according to claim 1, and contacting said DNA-based nanostructure with a medium comprising, or suspected to comprise, said viruses or viral particles.

18. The method of claim 17, wherein (i) a DNA-based half shell nanostructure comprising T_octa self-assembling DNA-based building blocks is selected for a virus of a size up to 50*50*50 nm³; (ii) the DNA-based half shell nanostructure comprising T1_pentamer_triangle self-assembling DNA-based building blocks is selected for a virus of a size between 15*15*15 and 100*100*100 nm³; (iii) the DNA-based half shell nanostructure comprising a combination of T1_pentamer_triangle and T1_ring_triangle self-assembling DNA-based building blocks is selected for a virus of a size between 15*15*15 and 100*100*100 nm³; and (iv) the DNA-based half shell nanostructure comprising T3_6_triangle self-assembling DNA-based building blocks is selected for a virus of a size of 50*50*50 nm³ or larger.
